(19) United States
(12) Patent Application Publication
(10) Pub. No.: US 2022/0145334 A1
(43) Pub. Date: May 12, 2022

(54) COMPOSITIONS AND METHODS FOR RNA-ENCODED DNA-REPLACEMENT OF ALLELES

(71) Applicant: Pairwise Plants Services, Inc., Durham, NC (US)

(72) Inventors: Yongjoo Kim, Chapel Hill, NC (US); Joseph Matthew Watts, Cary, NC (US); Aaron Hummel, Hillsborough, NC (US); Shai Joshua Lawit, Durham, NC (US); David Schwark, Apex, NC (US)

(21) Appl. No.: 17/520,246

(22) Filed: Nov. 5, 2021

Related U.S. Application Data
(60) Provisional application No. 63/110,386, filed on Nov. 6, 2020.

(51) Int. Cl. C12N 15/90; C12N 9/22; C12N 15/11; C12N 15/66; C07K 14/47; C12N 9/12

(52) U.S. Cl. CPC C12N 15/907; C12N 15/902; C12N 9/22; C12N 15/11; C12N 15/66; C07K 14/4702; C07K 2319/00; C12Y 207/07049; C12N 15/905; C12N 2310/20; C12N 2800/80; C12N 2800/10; C12N 9/1276

(57) ABSTRACT

This invention relates to recombinant nucleic constructs comprising CRISPR-Cas effector proteins, reverse transcriptases and extended guide nucleic acids and methods of use thereof for modifying nucleic acids in plants.

### STATEMENT OF PRIORITY

[0001] This application claims the benefit, under 35 U.S.C. § 119 (e), of U.S. Provisional Application No. 63/110,386 filed on Nov. 6, 2020, the entire contents of which is incorporated by reference herein.

### STATEMENT REGARDING ELECTRONIC FILING OF A SEQUENCE LISTING

[0002] A Sequence Listing in ASCII text format, submitted under 37 C.F.R. § 1.821, entitled 1499.57.ST25.txt, 1,043,359 bytes in size, generated on Nov. 5, 2021, and filed via EFS-Web, is provided in lieu of a paper copy. This Sequence Listing is hereby incorporated herein by reference into the specification for its disclosures.

### FIELD OF THE INVENTION

[0003] This invention relates to recombinant nucleic constructs comprising CRISPR-Cas effector proteins, reverse transcriptases and extended guide nucleic acids and methods of use thereof for modifying nucleic acids in plants.

### BACKGROUND OF THE INVENTION

[0004] Base editing has been shown to be an efficient way to change cytosine and adenine residues to thymine and guanine, respectively. These tools, while powerful, do have some limitations such as bystander bases, small base editing windows that give limited accessibility to trait-relevant targets unless enzymes with high PAM density are available to compensate, limited ability to convert cytosines and adenines to residues other than thymine and guanine, respectively, and no ability to edit thymine or guanine residues. Thus, the current tools available for base editing are limited. Therefore, to make nucleic acid editing more useful by increasing the range of possible edits for a greater number of organisms, new editing tools are needed.

### SUMMARY OF THE INVENTION

[0005] In a first aspect, a method of modifying a target nucleic acid is provided, the method comprising: contacting the target nucleic acid with (a) a Type V CRISPR-Cas effector protein or a Type II CRISPR-Cas effector protein; (b) a reverse transcriptase, and (c) an extended guide nucleic acid (e.g., extended Type II or Type V CRISPR RNA, extended Type II or Type V CRISPR DNA, extended Type II or Type V crRNA, extended Type II or Type V crDNA), thereby modifying the target nucleic acid.

[0006] In a second aspect, a method of modifying a target nucleic acid is provided, the method comprising: contacting the target nucleic acid at a first site with (a) (i) a first CRISPR-Cas effector protein; and (ii) a first extended guide nucleic acid (e.g., extended CRISPR RNA, extended CRISPR DNA, extended crRNA, extended crDNA); and (b) (i) a second CRISPR-Cas effector protein, (ii) a first reverse transcriptase; and (ii) a first guide nucleic acid, thereby modifying the target nucleic acid.

[0007] In a third aspect, a method of modifying a target nucleic acid in a plant or plant cell is provided, comprising introducing the expression cassette of the invention into the plant or plant cell, thereby modifying the target nucleic acid in the plant or plant cell and producing a plant or plant cell comprising the modified target nucleic acid.

[0008] In a fourth aspect, a complex is provided comprising: (a) a Type V CRISPR-Cas effector protein or a Type II CRISPR-Cas effector protein; (b) a reverse transcriptase, and (c) an extended guide nucleic acid (e.g., extended CRISPR RNA, extended CRISPR DNA, extended crRNA, extended crDNA, e.g., targeted allele guide (tag) nucleic acid (i.e., tagDNA, tagRNA)).

[0009] In a fifth aspect, an expression cassette codon optimized for expression in an organism is provided, the expression cassette comprising 5′ to 3′ (a) polynucleotide encoding a plant specific promoter sequence (e.g., ZmUbi1, MtUb2, RNA polymerase II (Pol II)), (b) a plant codon-optimized polynucleotide encoding a Type V CRISPR-Cas nuclease (e.g., Cpf1 (Cas12a), dCas12a and the like); (c) a linker sequence; and (d) a plant codon-optimized polynucleotide encoding a reverse transcriptase.

[0010] In a sixth aspect, an expression cassette codon optimized for expression in an organism is provided, the expression cassette comprising: (a) a polynucleotide encoding a promoter sequence, and (b) an extended RNA guide sequence, wherein the extended guide nucleic acid comprises an extended portion comprising at its 3′ end a primer binding site and an edit to be incorporated into the target nucleic acid (e.g., reverse transcriptase template), optionally wherein the extended guide nucleic acid is comprised in an expression cassette, optionally wherein the extended guide nucleic acid is operably linked to a Pol II promoter.

[0011] The invention further provides cells, including plant cells, bacterial cells, archaea cells, fungal cells, animal cells comprising target nucleic acids modified by the methods of the invention as well as organisms, including plants, bacteria, archaea, fungi, and animals, comprising the cells. Additionally, the present invention provides kits comprising the polynucleotides, polypeptides, and expression cassettes of the invention.

[0012] These and other aspects of the invention are set forth in more detail in the description of the invention below.

### BRIEF DESCRIPTION OF THE DRAWINGS

[0013] FIG. 1 provides a schematic showing the generation of DNA sequences from reverse transcription off the crRNA and subsequent integration into the nick site. The extended guide crRNA (tagRNA) is bound to the Cpf1 nickase (cas12a nickase) (nCpf1, upper left). Alternatively, the extension encoding the edit template may be located 5′ of the crRNA. The 3′ end of the crRNA is complimentary to the DNA at the nick site (nonbold pairing lines, upper left). The nCpf1 may be either covalently linked to the reverse transcriptase (RT) or the RT may be recruited to the nCpf1, in which case multiple reverse transcriptase proteins may be recruited to the nCpf1. The RT polymerizes DNA from the 3′ end of the DNA nick on the second strand generating a DNA sequence complimentary to the crRNA with nucleotides non-complimentary to the genome (bolded pairing lines, brace, upper right) followed by complimentary nucleotides (non-bold pairing lines, upper right). Upon dissociation, the resultant DNA has an extended ssDNA with a 3′ overhang, which is largely the same sequence as the original DNA (non-bolded pairing lines, lower right) but with some non-native nucleotides (bolded pairing lines, brace, lower right). This flap is in equilibrium with a structure having a 5′ overhang (lower left) where there are mismatched nucleotides incorporated into the DNA. The equilibrium may be driven toward the structure on the left by reducing mismatch repair, removal of the 5′ flap during repair and replication, and also by nicking the first strand as described herein.

[0014] FIG. 2 provides a schematic of showing a method for reducing mismatch repair. In order to drive the equilibrium more favorable for forming the final product with the modified nucleotides (bolded, brace), a nickase is directed (via a guide nucleic acid) to cut the first strand (e.g., target strand or bottom strand) of the target nucleic acid in a region outside of the RT-editing region (lightning bolts)—a distance from the nick in the second strand (e.g., target strand or top strand). The nCpf1:crRNA molecules may be on either side or both sides of the editing bubble. Nicking the first strand (dashed line) indicates to the cell that the newly incorporated nucleotides are the correct nucleotides during mismatch repair and replication, thus favoring a final product with the new nucleotides. Other possible ways of driving the equilibrium toward the desired product can include removal of the 5′ flap.

[0015] FIG. 3 shows alternative methods of modifying nucleic acids using the compositions of the present invention, wherein in two nicks are introduced in the second strand and the sequence introduced by the RT displaces the double-nicked WT sequence and thereby, is more efficiently incorporated into the genome.

[0016] FIG. 4. LbCas12a_R1138A is a nickase as demonstrated in vitro, resolved on a 1% TAE-agarose gel. A supercoiled 2.8 kB plasmid ran with an apparent size of 2.0 kB (lane 2) until a double-stranded break was generated by wildtype LbCas12a (lane 3).

[0017] FIG. 5 shows configurations of REDRAW editors tested in E. coli (see Example 1).

[0018] FIG. 6 shows conformations of tagRNAs tested in the first library.

[0019] FIG. 7 shows the structure of an example designed hairpin sequence for use in REDRAW editing (SEQ ID NO:203).

[0020] FIG. 8 shows Sanger sequencing results demonstrating a TGA>CTG edit in a defunct aadA gene, restoring antibiotic resistance (SEQ ID NOs 204-208). The edit was observed from a colony in Selection 10, with protein configuration SV40-MMLV-RT-XTEN-nLbCas12a-SV40 (SEQ ID NO:71).

[0021] FIG. 9 shows Sanger sequencing results demonstrating an AAA>CGT edit in the rpsL gene in the E. coli genome, conferring resistance to the antibiotic streptomycin (SEQ ID NOs 209-211). The edit was observed from a colony in Selection 2.5, with protein configuration SV40-MMLV-RT-XTEN-nRVRLbCas12a(H759A)-SV40 (SEQ ID NO:79).

[0022] FIG. 10 shows Sanger sequencing results demonstrating a TGA>GAT edit in a defunct aadA gene, restoring antibiotic resistance (SEQ ID NOs 212-215). The edit was observed from a colony in Selection 2.25, with protein configuration SV40-nLbCas12a-XTEN-MMLV-RT-SV40 (SEQ ID NO:73).

[0023] FIG. 11 shows Sanger sequencing results demonstrating a TGA>GAT edit in a defunct aadA gene, restoring antibiotic resistance (SEQ ID NOs 212-215). The edit was observed from a colony in Selection 2.31, with protein configuration SV40-MMLV-RT-XTEN-nLbCas12a(H759A)-SV40 (SEQ ID NO:83).

[0024] FIG. 12 shows an example editing method carried out in human cells (see Example 2). Panel A shows the double stranded target nucleic acid. Cas12a complex (complex includes the extended guide nucleic acid, which is not shown) is recruited to the first strand (target strand, bottom strand) with the 5′ flap in the second strand (top strand, non-target strand), optionally being removed with a 5′-3′ exonuclease (Panel B). Panel C shows the reverse transcriptase MMuLV-RT (5M) SEQ ID NO:53) extends from the priming site or primer (complementary to the primer binding site) on the target nucleic (dashed line=the extension). Panels D and E show the resolution of DNA intermediates via mismatch repair and DNA ligation and generation of a new edited DNA strand.

[0025] FIG. 13 shows precise editing using various guide conformations in HEK293T cells at FANCF1 site. The construct name is Cas12a (H759A)+RT(5M)+RecE FANCF1.

[0026] FIG. 14 shows precise editing using various guide conformations in HEK293T cells at DMNT1 site. The construct name is Cas12a (H759A)+RT(5M).

[0027] FIG. 15 shows the effect of exonuclease transfection on precise editing activity (normalized to no exonuclease treatment; pUC19=1) at DMNT1 site.

[0028] FIG. 16 shows various forms of REDRAW architecture (i.e., constructs of the invention) and the percent precise editing of each. The left panel shows the reverse transcriptase (RT) provided in trans (no recruitment). The middle panel shows recruitment of the RT using, as an example, SunTag (e.g., GCN4, e.g., SEQ ID NO:23) that is fused to the C-terminus of LbCpf1 (LBCas12a) (LBCpf1-SunTag), which can recruit antibody fused to the N-terminus of RT(5M) (scFv-RT (5M)) (e.g., scFv, SEQ ID NO:25). The right panel shows RT and lbCpf1 fusion proteins. The left side of the right panel shows the results with the RT fused to the C-terminus of LbCpf1 and the right side of the right panel shows the results with the RT fused to the N-terminus of LbCpf1.

[0029] FIG. 17 provides a schematic of the use of 5′-3′ exonuclease to degrade the DNA at both ends of the double-stranded break generated during the REDRAW process.

[0030] FIG. 18 shows the percent precise editing of REDRAW using a 5′-3′ exonuclease (RecE (SEQ ID NO:129), RecJ (SEQ ID NO:130), T5_Exo (SEQ ID NO:131), T7_Exo (SEQ ID NO:132)) that is fused to the C-terminus of the Cas polypeptide (LbCpf1). In this configuration, RT(5M) (SEQ ID NO:53) is expressed in trans (no recruitment).

[0031] FIG. 19 shows the percent precise editing of REDRAW using either the 5′-3′ exonuclease sbcB (SEQ ID NO:134) or the 5′-3′ exonuclease Exo (SEQ ID NO:135) each fused to the C-terminus of a Cas polypeptide (LbCpf1). RT (5M) is expressed in trans (no recruitment).

[0032] FIG. 20 shows the percent precise editing of REDRAW using trans expression of exonucleases. The LbCpf1 and RT are provided as fusion proteins. The right side of FIG. 20 shows results with the RT fused to the N-terminus of the LbCpf1 (RT(5M)-LbCpf1 (H759A)) and the left side of the figure shows the results using an RT fused to the C-terminus of the LbCpf1 (LbCpf1 (H759A)-RT(5M)).

[0033] FIG. 21 shows the effect on percent precise editing of REDRAW of example mutations in a Cas12a (LbCpf1) in the REDRAW process. The example mutations tested included K167A, K272A, K349A, K167A+K272A, K167A+K349A, K272A+K349A, and K167A+K272A+K349A (positions relative to LbCas12a (H759A) SEQ ID NO:148).

[0034] FIG. 22 shows the percent precise editing of REDRAW in the presence of single stranded DNA binding proteins (ssDNA BP). The ssDNA BP was expressed in trans in the presence of the CRISPR-Cas effector polypeptide (e.g., LbCpf1 (H759A)), RT(5M), and tagRNAl. The RT and LbCpf1 (H759A) were also expressed in trans in this example. The ssDNA BPs tested were hRad51_s208E A209D, hRad52, BsRecA, EcRecA, and T4SSB. Mock is no ssDNA BP.

[0035] FIG. 23 shows the percent precise editing of REDRAW in the presence of single stranded DNA binding proteins (ssDNA BP) when fused to a CRISPR-Cas effector polypeptide (e.g., LbCas12a H759A). ssDNA binding proteins (hRad51, hRad52, BsRecA, EcRecA, T4SSB and Brex27) were fused to N terminus or C-terminus of LbCpf1 (H759A). RT(5M) and the tagRNAs were expressed in trans.

[0036] FIG. 24 shows the effect of on the percent of indels produced when REDRAW is carried out in the presence of a polypeptide that prevents NHEJ. In this example, the polypeptide that prevents NHEJ is Gam protein (Escherichia phage Mu Gam protein) (SEQ ID NO:147), and the reverse transcriptase is expressed in trans, either as a native sequence (e.g., RT(5M)) or with Gam fused to the N-terminus of RT (e.g., Gam-RT(5M)). These constructs are expressed concurrently with either LbCas12a (H759A) or with an LbCas12a (H759A) having a Gam protein fused to its N-terminus (e.g., Gam-LbCas12a H759A).

[0037] FIG. 25 shows the percent precise editing of REDRAW in the presence Gam protein. The Gam protein is provided in trans, as a fusion protein with the reverse transcriptase (N-terminal fusion; Gam-RT(5M)) and/or as a fusion protein with the CRISPR-Cas effector polypeptide (e.g., Gam-LbCas12a H759A).

[0038] FIG. 26 shows the percent precise editing of REDRAW using different length primer binding sites (PBS) and reverse transcriptase templates (RTT). The top and bottom panels show the results using two different spacers (top panel: pwsp143 (GCTCAGCAGGCACCTGCCTCAGC) (SEQ ID NO:136), bottom panel: pwsp139 (CTGATGGTCCATGTCTGTTACTC) (SEQ ID NO:137).

[0039] FIG. 27 shows the percent editing depending on the location of the edit in two different reverse transcriptase templates (RTTs). The edit was placed in each RTT at positions varying from position −1 to position 19 (numbering is relative to the protospacer adjacent motif numbering in the target nucleic acid) (edit in bold font). RTT in the upper panel: TTTGGCTCACTCCTGCTCGGTGAATTT SEQ ID NO:187; RTT in the lower panel: TTTCGCGCTTGTTCCAATCAGTACGCA SEQ ID NO:188.

[0040] FIG. 28 shows the percent precise editing of REDRAW using two forms of Cas9, a nuclease (Cas9) and a nickase (nCas9 (D10A mutant)). Both Cas9 and nCas9 were tested using tagRNAs with extensions attached to either the 3′ end or the 5′ end of the guide RNA (denoted as 3′ extension or 5′ extension). The lengths of RTT and PBS of the tagRNA extensions were varied and the spacers targeted four different sites (pwsp10: GAGTCCGAGCAGAAGAAGAA (SEQ ID NO:140); pwsp621: GCATTTTCAGGAGGAAGCGA (SEQ ID NO:141); pwsp15: GTCATCTTAGTCATTACCTG (SEQ ID NO:142); pwsp11: GGAATCCCTTCTGCAGCACC (SEQ ID NO:143).

[0041] FIG. 29 shows the percent precise editing of REDRAW using BhCas12b. The BhCas12b was tested using tagRNAs with extensions attached to either the 3′ end or the 5′ end of guide RNA (denoted as 3′ or 5′). The lengths of RTT and PBS of the tagRNA extensions were varied and the spacers targeted three different sites (PWsp1099: ACGTACTGATGTTAACAGCTGA (SEQ ID NO:144); PWsp1098: GGTCAGCTGTTAACATCAGTAC (SEQ ID NO:145); PWsp1094: TCCAGCCCGCTGGCCCTGTAAA) (SEQ ID NO:146).

[0042] FIG. 30 shows the percent precise editing of REDRAW using EnAsCpf1 (H800A) (SEQ ID NO:149). The left panel shows editing without RT(5M), the middle panel shows editing with an EnAsCpf1 (H800A) having a C-terminal fused RT(5M) (EnAsCpf1 (H800A)-RT(5M)) and the right panel shows editing with an EnAsCpf1 (H800A) having an N-terminal fused RT(5M) (RT(5M)-EnAsCpf1 (H800A)). In this example, a single site was targeted with the spacer having the sequence of CCTCACTCCTGCTCGGTGAATTT (SEQ ID NO:171).

[0043] FIG. 31 shows the editing results for the URA3-1 target gene in yeast using the methods of the present invention (REDRAW). The upper panel shows editing results (colony formation upon repair of adenine auxotrophy by editing) using a LbCas12a having a reverse transcriptase (RT) fused to its C-terminus. The lower panel shows editing results (colony formation upon repair of adenine auxotrophy by editing) using a LbCas12a having a RT fused to its N-terminus. The extended guide used for the editing shown in FIG. 31 either does not have a pseudoknot or includes a pseudoknot at its 3′ end. The pseudoknots are referred to either as a decoy hairpin (SEQ ID NO:95; SEQ ID NO:203), tEvoPreQ1 (SEQ ID NO:158) or EvoPreQ1 (SEQ ID NO:191). The extended guide further includes an RTT having a length of 47, 55 or 63 nucleotides and a PBS having a length of 48 nucleotides.

[0044] FIG. 32 shows the editing results for the ADE2 target gene in yeast using the methods of the present invention (REDRAW). The upper panel shows editing results (colony formation upon repair of uracil auxotrophy by editing) using a LbCas12a having a RT fused to its C-terminus. The lower panel shows editing results (colony formation upon repair of uracil auxotrophy by editing) using a LbCas12a having a RT fused to its N-terminus. The extended guide used for the editing shown in FIG. 32 either does not have a pseudoknot or includes a pseudoknot at its 3′ end. The pseudoknots used are referred to either as a decoy hairpin (SEQ ID NO:95, SEQ ID NO:203) tEvoPreQ1 (SEQ ID NO:158) or EvoPreQ1 (SEQ ID NO:191). The extended guide further includes an RTT having a length of 40, 50 or 72 nucleotides and a PBS having a length of 48 nucleotides. In general, the extended guide nucleic acid comprises 5′-3′ an RTT, a PBS and when present, a 3′ pseudoknot. In the first column of data for the decoy hairpin, in both the upper and lower panels, the tagRNA with 40-bp RTT and decoy hairpin was unable to be synthesized and the condition was not tested.

[0045] FIG. 33 shows the percent precise editing results when using the ssRNA binding proteins, defensin (SEQ ID NO:152) and ORFS (SEQ ID NO:153), each fused to the N-terminus of a RT-LbCas12 fusion protein (e.g., RT-LbCas12a) as compared to the same RT-Cas12a fusion protein that does not comprise a ssRNA binding protein fused at its N-terminus.

[0046] FIG. 34 shows the percent precise editing results when using LbCas12a (H759A) fused at its N-terminus to reverse transcriptase (RT) domains having different mutations. The RT included: RT(L139P, D200N, W388R, E607K), RT(L139P, D200N, T306K, W313F, W388R, E607K), RT(5M, F155Y, H638G), RT(5M, Q221R, V223M) and RT(5M, D524N).

[0047] FIG. 35 shows the percent precise editing results using four different tagRNAs comprising a structured RNA at the 3′ end of each tag RNA. The nucleic acid sequences of the structured RNAs are provided in Table 16.

[0048] FIG. 36 shows the percent precise editing results using chromatin modulating peptides fused to constructs of the invention in various fusion orientations. The tested chromatin modulating peptides included HN1, HB1, H1G, and CHD1.

[0049] FIG. 37 shows the percent precise editing results for fusions using MS2/MCP system. LbCas12a H759A with RT(5M) was transiently expressed without MCP (in trans control), or with MCP-RT(5M) (fusion construct). Two tagRNAs were tested, tagRNA5 and tagRNA6. The different tagRNA versions tested included the tagRNAs modified with MS2 sequence at their 3′ end.

### BRIEF DESCRIPTION OF THE SEQUENCES

[0050] SEQ ID NOs:1-20 and 148-150 are example Cas12a amino acid sequences.

[0051] SEQ ID NO:21 and SEQ ID NO:22 are exemplary regulatory sequences encoding a promoter and intron.

[0052] SEQ ID NOs:23-25 provide example peptide tags and affinity polypeptides.

[0053] SEQ ID NO:26-36 provide example RNA recruiting motifs and corresponding affinity polypeptides.

[0054] SEQ ID NOS:37-52 provide example single stranded RNA binding domains (RBDs)

[0055] SEQ ID NOs:53, 97 and 172 provide example reverse transcriptase polypeptide sequences: Moloney Murine Leukemia Virus (M-MuLV)5(M), 5(M) flanked with NLS, and M-MuLV, respectively.

[0056] SEQ ID NOs:54-56 provides an example of a protospacer adjacent motif position for a Type V CRISPR-Cas12a nuclease.

[0057] SEQ ID NO:57 and SEQ ID NO:58 provide example constructs of the invention.

[0058] SEQ ID NO:59 and SEQ ID NO:60 provide an example CRISPR RNA and an example protospacer.

[0059] SEQ ID NO:61 and SEQ ID NO:62 provide example introns.

[0060] SEQ ID NOs:63-86 and SEQ ID NOs:154-157 provide example REDRAW editor constructs.

[0061] SEQ ID NO:87 provides an example of a tagRNA having an 11 base pair (bp) primer binding sequence and a 96 bp reverse transcriptase template.

[0062] SEQ ID NOs:88-91 provide sequences of example plasmids.

[0063] SEQ ID NOs:92-94 provide sequences of tagRNAs associated with the edits shown in FIGS. 9-11, respectively.

[0064] SEQ ID NO:95, SEQ ID NO:158, SEQ ID NO:191 and SEQ ID NO:203 and provide example pseudoknots sequences.

[0065] SEQ ID NO:96 provides an example LbCas12a having a mutation of H759A and flanked with NLS on both sides.

[0066] SEQ ID NOs:98-101 provide example 5′-3′ exonuclease polypeptides.

[0067] SEQ ID NO:102 and SEQ ID NO:103 provide example DMNT1 target site and target spacer.

[0068] SEQ ID NO:104 and SEQ ID NO:105 provide example FANCF1 target site and target spacer.

[0069] SEQ ID NO:106 and SEQ ID NO:107 provide example Cas9 polypeptides.

[0070] SEQ ID NOs:108-122 provide example Cas9 polynucleotides SEQ ID NOs:123-128 provide example single stranded DNA binding proteins.

[0071] SEQ ID NOs:129-135 provide example 5′-3′ exonucleases.

[0072] SEQ ID NOs:136, 137, 140-146, 159-161 and 171 are example spacers.

[0073] SEQ ID NOs:138, 139 and 164-169 provide example reverse transcriptase templates.

[0074] SEQ ID NO:140 provides an example Gam protein.

[0075] SEQ ID NO:151 provides an example Cas12b polypeptide.

[0076] SEQ ID NO:152 and SEQ ID NO:153 provide example single stranded RNA binding proteins, defensin and ORFS, respectively.

[0077] SEQ ID NO:162 and SEQ ID NO:163 provide example Primer Binding Site (PBS) sequences.

[0078] SEQ ID NO:170 provides an example LbCas12a crRNA scaffold.

[0079] SEQ ID NOs:173-186 provide example tagRNAs (tagRNA 1, tagRNA 2, tagRNA 3, tagRNA 4, tagRNA 5, tagRNA 6, tagRNA 7, tagRNA 8, tagRNA 9, tagRNA 10, tagRNA 11, tagRNA 12, tagRNA 13, and tagRNA 14, respectively).

[0080] SEQ ID NO:187 and SEQ ID NO:188 are the reverse transcriptase templates shown in FIG. 27.

[0081] SEQ ID NOs:95, 189-198, and 203 are example RNA structures.

[0082] SEQ ID NOs:199-202 are example chromatin modulating peptides.

[0083] SEQ ID NOs:204-215 are sequences found in FIGS. 8, 9, 10 and 11.

### DETAILED DESCRIPTION

[0084] The present invention now will be described hereinafter with reference to the accompanying drawings and examples, in which embodiments of the invention are shown. This description is not intended to be a detailed catalog of all the different ways in which the invention may be implemented, or all the features that may be added to the instant invention. For example, features illustrated with respect to one embodiment may be incorporated into other embodiments, and features illustrated with respect to a particular embodiment may be deleted from that embodiment. Thus, the invention contemplates that in some embodiments of the invention, any feature or combination of features set forth herein can be excluded or omitted. In addition, numerous variations and additions to the various embodiments suggested herein will be apparent to those skilled in the art in light of the instant disclosure, which do not depart from the instant invention. Hence, the following descriptions are intended to illustrate some particular embodiments of the invention, and not to exhaustively specify all permutations, combinations and variations thereof.

[0085] Unless otherwise defined, all technical and scientific terms used herein have the same meaning as commonly understood by one of ordinary skill in the art to which this invention belongs. The terminology used in the description of the invention herein is for the purpose of describing particular embodiments only and is not intended to be limiting of the invention.

[0086] All publications, patent applications, patents and other references cited herein are incorporated by reference in their entireties for the teachings relevant to the sentence and/or paragraph in which the reference is presented.

[0087] Unless the context indicates otherwise, it is specifically intended that the various features of the invention described herein can be used in any combination. Moreover, the present invention also contemplates that in some embodiments of the invention, any feature or combination of features set forth herein can be excluded or omitted. To illustrate, if the specification states that a composition comprises components A, B and C, it is specifically intended that any of A, B or C, or a combination thereof, can be omitted and disclaimed singularly or in any combination.

[0088] As used in the description of the invention and the appended claims, the singular forms “a,” “an” and “the” are intended to include the plural forms as well, unless the context clearly indicates otherwise.

[0089] Also as used herein, “and/or” refers to and encompasses any and all possible combinations of one or more of the associated listed items, as well as the lack of combinations when interpreted in the alternative (“or”).

[0090] The term “about,” as used herein when referring to a measurable value such as an amount or concentration and the like, is meant to encompass variations of ±10%, ±5%, ±1%, ±0.5%, or even ±0.1% of the specified value as well as the specified value. For example, “about X” where X is the measurable value, is meant to include X as well as variations of ±10%, ±5%, ±1%, ±0.5%, or even ±0.1% of X. A range provided herein for a measurable value may include any other range and/or individual value therein.

[0091] As used herein, phrases such as “between X and Y” and “between about X and Y” should be interpreted to include X and Y. As used herein, phrases such as “between about X and Y” mean “between about X and about Y” and phrases such as “from about X to Y” mean “from about X to about Y.”

[0092] Recitation of ranges of values herein are merely intended to serve as a shorthand method of referring individually to each separate value falling within the range, unless otherwise indicated herein, and each separate value is incorporated into the specification as if it were individually recited herein. For example, if the range 10 to15 is disclosed, then 11, 12, 13, and 14 are also disclosed.

[0093] The term “comprise,” “comprises” and “comprising” as used herein, specify the presence of the stated features, integers, steps, operations, elements, and/or components, but do not preclude the presence or addition of one or more other features, integers, steps, operations, elements, components, and/or groups thereof.

[0094] As used herein, the transitional phrase “consisting essentially of” means that the scope of a claim is to be interpreted to encompass the specified materials or steps recited in the claim and those that do not materially affect the basic and novel characteristic(s) of the claimed invention. Thus, the term “consisting essentially of” when used in a claim of this invention is not intended to be interpreted to be equivalent to “comprising.”

[0095] As used herein, the terms “increase,” “increasing,” “enhance,” “enhancing,” “improve” and “improving” (and grammatical variations thereof) describe an elevation of at least about 25%, 50%, 75%, 100%, 150%, 200%, 300%, 400%, 500% or more as compared to a control.

[0096] As used herein, the terms “reduce,” “reduced,” “reducing,” “reduction,” “diminish,” and “decrease” (and grammatical variations thereof), describe, for example, a decrease of at least about 5%, 10%, 15%, 20%, 25%, 35%, 50%, 75%, 80%, 85%, 90%, 95%, 97%, 98%, 99%, or 100% as compared to a control. In particular embodiments, the reduction can result in no or essentially no (i.e., an insignificant amount, e.g., less than about 10% or even 5%) detectable activity or amount.

[0097] A “heterologous” or a “recombinant” nucleotide sequence is a nucleotide sequence not naturally associated with a host cell into which it is introduced, including non-naturally occurring multiple copies of a naturally occurring nucleotide sequence.

[0098] A “native” or “wild type” nucleic acid, nucleotide sequence, polypeptide or amino acid sequence refers to a naturally occurring or endogenous nucleic acid, nucleotide sequence, polypeptide or amino acid sequence. Thus, for example, a “wild type mRNA” is an mRNA that is naturally occurring in or endogenous to the reference organism. A “homologous” nucleic acid sequence is a nucleotide sequence naturally associated with a host cell into which it is introduced.

[0099] As used herein, the terms “nucleic acid,” “nucleic acid molecule,” “nucleotide sequence” and “polynucleotide” refer to RNA or DNA that is linear or branched, single or double stranded, or a hybrid thereof. The term also encompasses RNA/DNA hybrids. When dsRNA is produced synthetically, less common bases, such as inosine, 5-methylcytosine, 6-methyladenine, hypoxanthine and others can also be used for antisense, dsRNA, and ribozyme pairing. For example, polynucleotides that contain C-5 propyne analogues of uridine and cytidine have been shown to bind RNA with high affinity and to be potent antisense inhibitors of gene expression. Other modifications, such as modification to the phosphodiester backbone, or the 2′-hydroxy in the ribose sugar group of the RNA can also be made.

[0100] As used herein, the term “nucleotide sequence” refers to a heteropolymer of nucleotides or the sequence of these nucleotides from the 5′ to 3′ end of a nucleic acid molecule and includes DNA or RNA molecules, including cDNA, a DNA fragment or portion, genomic DNA, synthetic (e.g., chemically synthesized) DNA, plasmid DNA, mRNA, and anti-sense RNA, any of which can be single stranded or double stranded. The terms “nucleotide sequence” “nucleic acid,” “nucleic acid molecule,” “nucleic acid construct,” “oligonucleotide” and “polynucleotide” are also used interchangeably herein to refer to a heteropolymer of nucleotides. Nucleic acid molecules and/or nucleotide sequences provided herein are presented herein in the 5′ to 3′ direction, from left to right and are represented using the standard code for representing the nucleotide characters as set forth in the U.S. sequence rules, 37 CFR §§ 1.821-1.825 and the World Intellectual Property Organization (WIPO) Standard ST.25. A “5′ region” as used herein can mean the region of a polynucleotide that is nearest the 5′ end of the polynucleotide. Thus, for example, an element in the 5′ region of a polynucleotide can be located anywhere from the first nucleotide located at the 5′ end of the polynucleotide to the nucleotide located halfway through the polynucleotide. A “3′ region” as used herein can mean the region of a polynucleotide that is nearest the 3′ end of the polynucleotide. Thus, for example, an element in the 3′ region of a polynucleotide can be located anywhere from the first nucleotide located at the 3′ end of the polynucleotide to the nucleotide located halfway through the polynucleotide.

[0101] As used herein, the term “gene” refers to a nucleic acid molecule capable of being used to produce mRNA, antisense RNA, miRNA, anti-microRNA antisense oligodeoxyribonucleotide (AMO) and the like. Genes may or may not be capable of being used to produce a functional protein or gene product. Genes can include both coding and non-coding regions (e.g., introns, regulatory elements, promoters, enhancers, termination sequences and/or 5′ and 3′ untranslated regions). A gene may be “isolated” by which is meant a nucleic acid that is substantially or essentially free from components normally found in association with the nucleic acid in its natural state. Such components include other cellular material, culture medium from recombinant production, and/or various chemicals used in chemically synthesizing the nucleic acid.

[0102] The term “mutation” refers to point mutations (e.g., missense, or nonsense, or insertions or deletions of single base pairs that result in frame shifts), insertions, deletions, and/or truncations. When the mutation is a substitution of a residue within an amino acid sequence with another residue, or a deletion or insertion of one or more residues within a sequence, the mutations are typically described by identifying the original residue followed by the position of the residue within the sequence and by the identity of the newly substituted residue.

[0103] The terms “complementary” or “complementarity,” as used herein, refer to the natural binding of polynucleotides under permissive salt and temperature conditions by base-pairing. For example, the sequence “A-G-T” (5′ to 3′) binds to the complementary sequence “T-C-A” (3′ to 5′). Complementarity between two single-stranded molecules may be “partial,” in which only some of the nucleotides bind, or it may be complete when total complementarity exists between the single stranded molecules. The degree of complementarity between nucleic acid strands has significant effects on the efficiency and strength of hybridization between nucleic acid strands.

[0104] “Complement” as used herein can mean 100% complementarity with the comparator nucleotide sequence or it can mean less than 100% complementarity (e.g., about 70%, 71%, 72%, 73%, 74%, 75%, 76%, 77%, 78%, 79%, 80%, 81%, 82%, 83%, 84%, 85%, 86%, 87%, 88%, 89%, 90%, 91%, 92%, 93%, 94%, 95%, 96%, 97%, 98%, 99%, and the like, complementarity).

[0105] A “portion” or “fragment” of a nucleotide sequence of the invention will be understood to mean a nucleotide sequence of reduced length relative (e.g., reduced by 1, 2, 3, 4, 5, 6, 7, 8, 9, 10, 11, 12, 13, 14, 15, 16, 17, 18, 19, 20 or more nucleotides) to a reference nucleic acid or nucleotide sequence and comprising, consisting essentially of and/or consisting of a nucleotide sequence of contiguous nucleotides identical or almost identical (e.g., 70%, 71%, 72%, 73%, 74%, 75%, 76%, 77%, 78%, 79%, 80%, 81%, 82%, 83%, 84%, 85%, 86%, 87%, 88%, 89%, 90%, 91%, 92%, 93%, 94%, 95%, 96%, 97%, 98%, 99% identical) to the reference nucleic acid or nucleotide sequence. Such a nucleic acid fragment or portion according to the invention may be, where appropriate, included in a larger polynucleotide of which it is a constituent. As an example, a repeat sequence of a guide nucleic acid of this invention may comprise a portion of a wild type Type V CRISPR-Cas repeat sequence (e.g., a wild Type CRISPR-Cas repeat, e.g., a repeat from the CRISPR Cas system of a Cas12a (Cpf1), Cas12b (C2c1), Cas12c (C2c3), Cas12d (CasY), Cas12e (CasX), Cas12g, Cas12h, Cas12i, C2c4, C2c5, C2c8, C2c9, C2c10, Cas14a, Cas14b, and/or a Cas14c, and the like). In some embodiments, a repeat sequence of a guide nucleic acid of this invention may comprise a portion of a wild type CRISPR-Cas9 repeat sequence.

[0106] Different nucleic acids or proteins having homology are referred to herein as “homologues.” The term homologue includes homologous sequences from the same and other species and orthologous sequences from the same and other species. “Homology” refers to the level of similarity between two or more nucleic acid and/or amino acid sequences in terms of percent of positional identity (i.e., sequence similarity or identity). Homology also refers to the concept of similar functional properties among different nucleic acids or proteins. Thus, the compositions and methods of the invention further comprise homologues to the nucleotide sequences and polypeptide sequences of this invention. “Orthologous,” as used herein, refers to homologous nucleotide sequences and/or amino acid sequences in different species that arose from a common ancestral gene during speciation. A homologue of a nucleotide sequence of this invention has a substantial sequence identity (e.g., at least about 70%, 71%, 72%, 73%, 74%, 75%, 76%, 77%, 78%, 79%, 80%, 81%, 82%, 83%, 84%, 85%, 86%, 87%, 88%, 89%, 90%, 91%, 92%, 93%, 94%, 95%, 96%, 97%, 98%, 99%, 99.5% or 100%) to said nucleotide sequence of the invention.

[0107] As used herein “sequence identity” refers to the extent to which two optimally aligned polynucleotide or polypeptide sequences are invariant throughout a window of alignment of components, e.g., nucleotides or amino acids. “Identity” can be readily calculated by known methods including, but not limited to, those described in: Computational Molecular Biology (Lesk, A. M., ed.) Oxford University Press, New York (1988); Biocomputing: Informatics and Genome Projects (Smith, D. W., ed.) Academic Press, New York (1993); Computer Analysis of Sequence Data, Part I (Griffin, A. M., and Griffin, H. G., eds.) Humana Press, New Jersey (1994); Sequence Analysis in Molecular Biology (von Heinje, G., ed.) Academic Press (1987); and Sequence Analysis Primer (Gribskov, M. and Devereux, J., eds.) Stockton Press, New York (1991).

[0108] As used herein, the term “percent sequence identity” or “percent identity” refers to the percentage of identical nucleotides in a linear polynucleotide sequence of a reference (“query”) polynucleotide molecule (or its complementary strand) as compared to a test (“subject”) polynucleotide molecule (or its complementary strand) when the two sequences are optimally aligned. In some embodiments, “percent identity” can refer to the percentage of identical amino acids in an amino acid sequence as compared to a reference polypeptide.

[0109] As used herein, the phrase “substantially identical,” or “substantial identity” in the context of two nucleic acid molecules, nucleotide sequences or protein sequences, refers to two or more sequences or subsequences that have at least about 70%, 71%, 72%, 73%, 74%, 75%, 76%, 77%, 78%, 79%, 80%, 81%, 82%, 83%, 84%, 85%, 86%, 87%, 88%, 89%, 90%, 91%, 92%, 93%, 94%, 95%, 96%, 97%, 98%, 99%, 99.5%, 99.6%, 99.7%, 99.8%, 99.9% or more nucleotide or amino acid residue identity, when compared and aligned for maximum correspondence, as measured using one of the following sequence comparison algorithms or by visual inspection. In some embodiments of the invention, the substantial identity exists over a region of consecutive nucleotides of a nucleotide sequence of the invention that is about 10 nucleotides to about 20 nucleotides, about 10 nucleotides to about 25 nucleotides, about 10 nucleotides to about 30 nucleotides, about 15 nucleotides to about 25 nucleotides, about 30 nucleotides to about 40 nucleotides, about 50 nucleotides to about 60 nucleotides, about 70 nucleotides to about 80 nucleotides, about 90 nucleotides to about 100 nucleotides, or more nucleotides in length, and any range therein, up to the full length of the sequence. In some embodiments, the nucleotide sequences can be substantially identical over at least about 20 nucleotides (e.g., about 20, 21, 22, 23, 24, 25, 26, 27, 28, 29, 30, 31, 32, 33, 34, 35, 36, 37, 38, 39, 40 nucleotides). In some embodiments, a substantially identical nucleotide or protein sequence performs substantially the same function as the nucleotide (or encoded protein sequence) to which it is substantially identical.

[0110] For sequence comparison, typically one sequence acts as a reference sequence to which test sequences are compared. When using a sequence comparison algorithm, test and reference sequences are entered into a computer, subsequence coordinates are designated if necessary, and sequence algorithm program parameters are designated. The sequence comparison algorithm then calculates the percent sequence identity for the test sequence(s) relative to the reference sequence, based on the designated program parameters.

[0111] Optimal alignment of sequences for aligning a comparison window are well known to those skilled in the art and may be conducted by tools such as the local homology algorithm of Smith and Waterman, the homology alignment algorithm of Needleman and Wunsch, the search for similarity method of Pearson and Lipman, and optionally by computerized implementations of these algorithms such as GAP, BESTFIT, FASTA, and TFASTA available as part of the GCG® Wisconsin Package® (Accelrys Inc., San Diego, Calif.). An “identity fraction” for aligned segments of a test sequence and a reference sequence is the number of identical components which are shared by the two aligned sequences divided by the total number of components in the reference sequence segment, e.g., the entire reference sequence or a smaller defined part of the reference sequence. Percent sequence identity is represented as the identity fraction multiplied by 100. The comparison of one or more polynucleotide sequences may be to a full-length polynucleotide sequence or a portion thereof, or to a longer polynucleotide sequence. For purposes of this invention “percent identity” may also be determined using BLASTX version 2.0 for translated nucleotide sequences and BLASTN version 2.0 for polynucleotide sequences.

[0112] Two nucleotide sequences may also be considered substantially complementary when the two sequences hybridize to each other under stringent conditions. In some representative embodiments, two nucleotide sequences considered to be substantially complementary hybridize to each other under highly stringent conditions.

[0113] “Stringent hybridization conditions” and “stringent hybridization wash conditions” in the context of nucleic acid hybridization experiments such as Southern and Northern hybridizations are sequence dependent and are different under different environmental parameters. An extensive guide to the hybridization of nucleic acids is found in Tijssen Laboratory Techniques in Biochemistry and Molecular Biology-Hybridization with Nucleic Acid Probes part I chapter 2 “Overview of principles of hybridization and the strategy of nucleic acid probe assays” Elsevier, New York (1993). Generally, highly stringent hybridization and wash conditions are selected to be about 5° C. lower than the thermal melting point (Tₘ) for the specific sequence at a defined ionic strength and pH.

[0114] The Tₘ is the temperature (under defined ionic strength and pH) at which 50% of the target sequence hybridizes to a perfectly matched probe. Very stringent conditions are selected to be equal to the Tₘ for a particular probe. An example of stringent hybridization conditions for hybridization of complementary nucleotide sequences which have more than 100 complementary residues on a filter in a Southern or northern blot is 50% formamide with 1 mg of heparin at 42° C., with the hybridization being carried out overnight. An example of highly stringent wash conditions is 0.1 5M NaCl at 72° C. for about 15 minutes. An example of stringent wash conditions is a 0.2×SSC wash at 65° C. for 15 minutes (see, Sambrook, infra, for a description of SSC buffer). Often, a high stringency wash is preceded by a low stringency wash to remove background probe signal. An example of a medium stringency wash for a duplex of, e.g., more than 100 nucleotides, is 1×SSC at 45° C. for 15 minutes. An example of a low stringency wash for a duplex of, e.g., more than 100 nucleotides, is 4-6×SSC at 40° C. for 15 minutes. For short probes (e.g., about 10 to 50 nucleotides), stringent conditions typically involve salt concentrations of less than about 1.0 M Na ion, typically about 0.01 to 1.0 M Na ion concentration (or other salts) at pH 7.0 to 8.3, and the temperature is typically at least about 30° C. Stringent conditions can also be achieved with the addition of destabilizing agents such as formamide. In general, a signal to noise ratio of 2x (or higher) than that observed for an unrelated probe in the particular hybridization assay indicates detection of a specific hybridization. Nucleotide sequences that do not hybridize to each other under stringent conditions are still substantially identical if the proteins that they encode are substantially identical. This can occur, for example, when a copy of a nucleotide sequence is created using the maximum codon degeneracy permitted by the genetic code.

[0115] The polynucleotide and/or recombinant nucleic acid constructs of this invention can be codon optimized for expression. In some embodiments, the polynucleotides, nucleic acid constructs, expression cassettes, and/or vectors of the invention (e.g., comprising/encoding a CRISPR-Cas effector protein (e.g., a Type V CRISPR-Cas effector protein), a reverse transcriptase, a flap endonuclease, a 5′-3′ exonuclease, and the like) are codon optimized for expression in an organism (e.g., in a particular species), optionally an animal, a plant, a fungus, an archaeon, or a bacterium. In some embodiments, the codon optimized nucleic acid constructs, polynucleotides, expression cassettes, and/or vectors of the invention have about 70% to about 99.9% (e.g., 70%, 71%, 72%, 73%, 74%, 75%, 76%, 77%, 78%, 79%, 80%, 81%, 82%, 83%, 84%, 85%, 86%, 87%, 88%, 89%, 90%, 91%, 92%, 93%, 94%, 95%, 96%, 97%, 98%, 99%, 99.5%, or 99.9%) identity or more to the nucleic acid constructs, polynucleotides, expression cassettes, and/or vectors that have not been codon optimized.

[0116] In any of the embodiments described herein, a polynucleotide or nucleic acid construct of the invention may be operatively associated with a variety of promoters and/or other regulatory elements for expression in a plant and/or a cell of a plant. Thus, in some embodiments, a polynucleotide or nucleic acid construct of this invention may further comprise one or more promoters, introns, enhancers, and/or terminators operably linked to one or more nucleotide sequences. In some embodiments, a promoter may be operably associated with an intron (e.g., Ubi1 promoter and intron). In some embodiments, a promoter associated with an intron maybe referred to as a “promoter region” (e.g., Ubi1 promoter and intron).

[0117] By “operably linked” or “operably associated” as used herein in reference to polynucleotides, it is meant that the indicated elements are functionally related to each other and are also generally physically related. Thus, the term “operably linked” or “operably associated” as used herein, refers to nucleotide sequences on a single nucleic acid molecule that are functionally associated. Thus, a first nucleotide sequence that is operably linked to a second nucleotide sequence means a situation when the first nucleotide sequence is placed in a functional relationship with the second nucleotide sequence. For instance, a promoter is operably associated with a nucleotide sequence if the promoter effects the transcription or expression of said nucleotide sequence. Those skilled in the art will appreciate that the control sequences (e.g., promoter) need not be contiguous with the nucleotide sequence to which it is operably associated, as long as the control sequences function to direct the expression thereof. Thus, for example, intervening untranslated, yet transcribed, nucleic acid sequences can be present between a promoter and the nucleotide sequence, and the promoter can still be considered “operably linked” to the nucleotide sequence.

[0118] As used herein, the term “linked,” in reference to polypeptides, refers to the attachment of one polypeptide to another. A polypeptide may be linked to another polypeptide (at the N-terminus or the C-terminus) directly (e.g., via a peptide bond) or through a linker.

[0119] The term “linker” is art-recognized and refers to a chemical group, or a molecule linking two molecules or moieties, e.g., two domains of a fusion protein, such as, for example, a DNA binding polypeptide or domain and peptide tag and/or a reverse transcriptase and an affinity polypeptide that binds to the peptide tag; or a DNA endonuclease polypeptide or domain and peptide tag and/or a reverse transcriptase and an affinity polypeptide that binds to the peptide tag. A linker may be comprised of a single linking molecule or may comprise more than one linking molecule. In some embodiments, the linker can be an organic molecule, group, polymer, or chemical moiety such as a bivalent organic moiety. In some embodiments, the linker may be an amino acid, or it may be a peptide. In some embodiments, the linker is a peptide.

[0120] In some embodiments, a peptide linker useful with this invention may be about 2 to about 100 or more amino acids in length, for example, about 2, 3, 4, 5, 6, 7, 8, 9, 10, 11, 12, 13, 14, 15, 16, 17, 18, 19, 20, 21, 22, 23, 24, 25, 26, 27, 28, 29, 30, 31, 32, 33, 34, 35, 36, 37, 38, 39, 40, 41, 42, 43, 44, 45, 46, 47, 48, 49, 50, 51, 52, 53, 54, 55, 56, 57, 58, 59, 60, 61, 62, 63, 64, 65, 66, 67, 68, 69, 70, 71, 72, 73, 74, 75, 76, 77, 78, 79, 80, 81, 82, 83, 84, 85, 86, 87, 88, 89, 90, 91, 92, 93, 94, 95, 96, 97, 98, 99, 100 or more amino acids in length (e.g., about 2 to about 40, about 2 to about 50, about 2 to about 60, about 4 to about 40, about 4 to about 50, about 4 to about 60, about 5 to about 40, about 5 to about 50, about 5 to about 60, about 9 to about 40, about 9 to about 50, about 9 to about 60, about 10 to about 40, about 10 to about 50, about 10 to about 60, or about 2, 3, 4, 5, 6, 7, 8, 9, 10, 11, 12, 13, 14, 15, 16, 17, 18, 19, 20, 21, 22, 23, 24, 25 amino acids to about 26, 27, 28, 29, 30, 31, 32, 33, 34, 35, 36, 37, 38, 39, 40, 41, 42, 43, 44, 45, 46, 47, 48, 49, 50, 51, 52, 53, 54, 55, 56, 57, 58, 59, 60, 61, 62, 63, 64, 65, 66, 67, 68, 69, 70, 71, 72, 73, 74, 75, 76, 77, 78, 79, 80, 81, 82, 83, 84, 85, 86, 87, 88, 89, 90, 91, 92, 93, 94, 95, 96, 97, 98, 99, 100 or more amino acids in length (e.g., about 105, 110, 115, 120, 130, 140 150 or more amino acids in length). In some embodiments, a peptide linker may be a GS linker.

[0121] As used herein, the term “linked,” or “fused” in reference to polynucleotides, refers to the attachment of one polynucleotide to another. In some embodiments, two or more polynucleotide molecules may be linked by a linker that can be an organic molecule, group, polymer, or chemical moiety such as a bivalent organic moiety. A polynucleotide may be linked or fused to another polynucleotide (at the 5′ end or the 3′ end) via a covalent or non-covenant linkage or binding, including e.g., Watson-Crick base-pairing, or through one or more linking nucleotides. In some embodiments, a polynucleotide motif of a certain structure may be inserted within another polynucleotide sequence (e.g., extension of the hairpin structure in guide RNA). In some embodiments, the linking nucleotides may be naturally occurring nucleotides. In some embodiments, the linking nucleotides may be non-naturally occurring nucleotides.

[0122] A “promoter” is a nucleotide sequence that controls or regulates the transcription of a nucleotide sequence (e.g., a coding sequence) that is operably associated with the promoter. The coding sequence controlled or regulated by a promoter may encode a polypeptide and/or a functional RNA. Typically, a “promoter” refers to a nucleotide sequence that contains a binding site for RNA polymerase II and directs the initiation of transcription. In general, promoters are found 5′, or upstream, relative to the start of the coding region of the corresponding coding sequence. A promoter may comprise other elements that act as regulators of gene expression; e.g., a promoter region. These include a TATA box consensus sequence, and often a CAAT box consensus sequence (Breathnach and Chambon, (1981) Annu. Rev. Biochem. 50:349). In plants, the CAAT box may be substituted by the AGGA box (Messing et al., (1983) in Genetic Engineering of Plants, T. Kosuge, C. Meredith and A. Hollaender (eds.), Plenum Press, pp. 211-227). In some embodiments, a promoter region may comprise at least one intron (see, e.g., SEQ ID NO:21, SEQ ID NO:22).

[0123] Promoters useful with this invention can include, for example, constitutive, inducible, temporally regulated, developmentally regulated, chemically regulated, tissue-preferred and/or tissue-specific promoters for use in the preparation of recombinant nucleic acid molecules, e.g., “synthetic nucleic acid constructs” or “protein-RNA complex.” These various types of promoters are known in the art.

[0124] The choice of promoter may vary depending on the temporal and spatial requirements for expression, and also may vary based on the host cell to be transformed. Promoters for many different organisms are well known in the art. Based on the extensive knowledge present in the art, the appropriate promoter can be selected for the particular host organism of interest. Thus, for example, much is known about promoters upstream of highly constitutively expressed genes in model organisms and such knowledge can be readily accessed and implemented in other systems as appropriate.

[0125] In some embodiments, a promoter functional in a plant may be used with the constructs of this invention. Non-limiting examples of a promoter useful for driving expression in a plant include the promoter of the RubisCo small subunit gene 1 (PrbcS1), the promoter of the actin gene (Pactin), the promoter of the nitrate reductase gene (Pnr) and the promoter of duplicated carbonic anhydrase gene 1 (Pdcal) (See, Walker et al. Plant Cell Rep. 23:727-735 (2005); Li et al. Gene 403:132-142 (2007); Li et al. Mol Biol. Rep. 37:1143-1154 (2010)). PrbcS1 and Pactin are constitutive promoters and Pnr and Pdcal are inducible promoters. Pnr is induced by nitrate and repressed by ammonium (Li et al. Gene 403:132-142 (2007)) and Pdcal is induced by salt (Li et al. Mol Biol. Rep. 37:1143-1154 (2010)). In some embodiments, a promoter useful with this invention is RNA polymerase II (Pol II) promoter. In some embodiments, a U6 promoter or a 7SL promoter from Zea mays may be useful with constructs of this invention. In some embodiments, the U6c promoter and/or 7SL promoter from Zea mays may be useful for driving expression of a guide nucleic acid. In some embodiments, a U6c promoter, U6i promoter and/or 7SL promoter from Glycine max may be useful with constructs of this invention. In some embodiments, the U6c promoter, U6i promoter and/or 7SL promoter from Glycine max may be useful for driving expression of a guide nucleic acid.

[0126] Examples of constitutive promoters useful for plants include, but are not limited to, cestrum virus promoter (cmp) (U.S. Pat. No. 7,166,770), the rice actin 1 promoter (Wang et al. (1992) Mol. Cell. Biol. 12:3399-3406; as well as U.S. Pat. No. 5,641,876), CaMV 35S promoter (Odell et al. (1985) Nature 313:810-812), CaMV 19S promoter (Lawton et al. (1987) Plant Mol. Biol. 9:315-324), nos promoter (Ebert et al. (1987) Proc. Natl. Acad. Sci USA 84:5745-5749), Adh promoter (Walker et al. (1987) Proc. Natl. Acad. Sci. USA 84:6624-6629), sucrose synthase promoter (Yang & Russell (1990) Proc. Natl. Acad. Sci. USA 87:4144-4148), and the ubiquitin promoter. The constitutive promoter derived from ubiquitin accumulates in many cell types. Ubiquitin promoters have been cloned from several plant species for use in transgenic plants, for example, sunflower (Binet et al., 1991. Plant Science 79: 87-94), maize (Christensen et al., 1989. Plant Molec. Biol. 12: 619-632), and arabidopsis (Norris et al. 1993. Plant Molec. Biol. 21:895-906). The maize ubiquitin promoter (UbiP) has been developed in transgenic monocot systems and its sequence and vectors constructed for monocot transformation are disclosed in the patent publication EP 0 342 926. The ubiquitin promoter is suitable for the expression of the nucleotide sequences of the invention in transgenic plants, especially monocotyledons. Further, the promoter expression cassettes described by McElroy et al. (Mol. Gen. Genet. 231: 150-160 (1991)) can be easily modified for the expression of the nucleotide sequences of the invention and are particularly suitable for use in monocotyledonous hosts.

[0127] In some embodiments, tissue specific/tissue preferred promoters can be used for expression of a heterologous polynucleotide in a plant cell. Tissue specific or preferred expression patterns include, but are not limited to, green tissue specific or preferred, root specific or preferred, stem specific or preferred, flower specific or preferred or pollen specific or preferred. Promoters suitable for expression in green tissue include many that regulate genes involved in photosynthesis and many of these have been cloned from both monocotyledons and dicotyledons. In one embodiment, a promoter useful with the invention is the maize PEPC promoter from the phosphoenol carboxylase gene (Hudspeth & Grula, Plant Molec. Biol. 12:579-589 (1989)). Non-limiting examples of tissue-specific promoters include those associated with genes encoding the seed storage proteins (such as β-conglycinin, cruciferin, napin and phaseolin), zein or oil body proteins (such as oleosin), or proteins involved in fatty acid biosynthesis (including acyl carrier protein, stearoyl-ACP desaturase and fatty acid desaturases (fad 2-1)), and other nucleic acids expressed during embryo development (such as Bce4, see, e.g., Kridl et al. (1991) Seed Sci. Res. 1:209-219; as well as EP Patent No. 255378). Tissue-specific or tissue-preferential promoters useful for the expression of the nucleotide sequences of the invention in plants, particularly maize, include but are not limited to those that direct expression in root, pith, leaf or pollen. Such promoters are disclosed, for example, in WO 93/07278, herein incorporated by reference in its entirety. Other non-limiting examples of tissue specific or tissue preferred promoters useful with the invention the cotton rubisco promoter disclosed in U.S. Pat. No. 6,040,504; the rice sucrose synthase promoter disclosed in U.S. Pat. No. 5,604,121; the root specific promoter described by de Framond (FEBS 290:103-106 (1991); EP 0 452 269 to Ciba-Geigy); the stem specific promoter described in U.S. Pat. No. 5,625,136 (to Ciba-Geigy) and which drives expression of the maize trpA gene; the cestrum yellow leaf curling virus promoter disclosed in WO 01/73087; and pollen specific or preferred promoters including, but not limited to, ProOsLPS10 and ProOsLPS11 from rice (Nguyen et al. Plant Biotechnol. Reports 9(5):297-306 (2015)), ZmSTK2 USP from maize (Wang et al. Genome 60(6):485-495 (2017)), LAT52 and LAT59 from tomato (Twell et al. Development 109(3):705-713 (1990)), Zm13 (U.S. Pat. No. 10,421,972), PLA₂-δ promoter from arabidopsis (U.S. Pat. No. 7,141,424), and/or the ZmC5 promoter from maize (International PCT Publication No. WO1999/042587.

[0128] Additional examples of plant tissue-specific/tissue preferred promoters include, but are not limited to, the root hair specific cis-elements (RHEs) (Kim et al. The Plant Cell 18:2958-2970 (2006)). the root-specific promoters RCc3 (Jeong et al. Plant Physiol. 153:185-197 (2010)) and RB7 (U.S. Pat. No. 5,459,252), the lectin promoter (Lindstrom et al. (1990) Der. Genet. 11:160-167; and Vodkin (1983) Prog. Clin. Biol. Res. 138:87-98), corn alcohol dehydrogenase 1 promoter (Dennis et al. (1984) Nucleic Acids Res. 12:3983-4000), S-adenosyl-L-tnethionine synthetase (S AMS) (Vander Mijnsbrugge et al. (1996) Plant and Cell Physiology, 37(8):1108-1115), corn light harvesting complex promoter (Bansal et al. (1992) Proc. Natl. Acad. Sci. USA 89:3654-3658), corn heat shock protein promoter (O'Dell et al. (1985) EMBO J. 5:451-458; and Rochester et al. (1986) EMBO J. 5:451-458), pea small subunit RuBP carboxylase promoter (Cashmore, “Nuclear genes encoding the small subunit of ribulose-1,5-bisphosphate carboxylase” pp. 29-39 In: Genetic Engineering of Plants (Hollaender ed., Plenum Press 1983; and Poulsen et al. (1986) Mol. Gen. Genet. 205:193-200), Ti plasmid mannopine synthase promoter (Langridge et al. (1989) Proc. Natl. Acad. Sci. USA 86:3219-3223), Ti plasmid nopaline synthase promoter (Langridge et al. (1989), supra), petunia chalcone isomerase promoter (van Tunen et al. (1988) EMBO J. 7:1257-1263), bean glycine rich protein 1 promoter (Keller et al. (1989) Genes Dev. 3:1639-1646), truncated CaMV 35S promoter (O'Dell et al. (1985) Nature 313:810-812), potato patatin promoter (Wenzler et al. (1989) Plant Mol. Biol. 13:347-354), root cell promoter (Yamamoto et al. (1990) Nucleic Acids Res. 18:7449), maize zein promoter (Kriz et al. (1987) Mol. Gen. Genet. 207:90-98; Langridge et al. (1983) Cell 34:1015-1022; Reina et al. (1990) Nucleic Acids Res. 18:6425; Reina et al. (1990) Nucleic Acids Res. 18:7449; and Wandelt et al. (1989) Nucleic Acids Res. 17:2354), globulin-1 promoter (Belanger et al. (1991) Genetics 129:863-872), α-tubulin cab promoter (Sullivan et al. (1989)Mol. Gen. Genet. 215:431-440), PEPCase promoter (Hudspeth & Grula (1989) Plant Mol. Biol. 12:579-589), R gene complex-associated promoters (Chandler et al. (1989) Plant Cell 1:1175-1183), and chalcone synthase promoters (Franken et al. (1991) EMBO J. 10:2605-2612).

[0129] Useful for seed-specific expression is the pea vicilin promoter (Czako et al. (1992) Mol. Gen. Genet. 235:33-40; as well as the seed-specific promoters disclosed in U.S. Pat. No. 5,625,136. Useful promoters for expression in mature leaves are those that are switched at the onset of senescence, such as the SAG promoter from Arabidopsis (Gan et al. (1995) Science 270:1986-1988).

[0130] In addition, promoters functional in chloroplasts can be used. Non-limiting examples of such promoters include the bacteriophage T3 gene 9 5′ UTR and other promoters disclosed in U.S. Pat. No. 7,579,516. Other promoters useful with the invention include but are not limited to the S-E9 small subunit RuBP carboxylase promoter and the Kunitz trypsin inhibitor gene promoter (Kti3).

[0131] Additional regulatory elements useful with this invention include, but are not limited to, introns, enhancers, termination sequences and/or 5′ and 3′ untranslated regions.

[0132] An intron useful with this invention can be an intron identified in and isolated from a plant and then inserted into an expression cassette to be used in transformation of a plant. As would be understood by those of skill in the art, introns can comprise the sequences required for self-excision and are incorporated into nucleic acid constructs/expression cassettes in frame. An intron can be used either as a spacer to separate multiple protein-coding sequences in one nucleic acid construct, or an intron can be used inside one protein-coding sequence to, for example, stabilize the mRNA. If they are used within a protein-coding sequence, they are inserted “in-frame” with the excision sites included. Introns may also be associated with promoters to improve or modify expression. As an example, a promoter/intron combination useful with this invention includes but is not limited to that of the maize Ubi1 promoter and intron.

[0133] Non-limiting examples of introns useful with the present invention include introns from the ADHI gene (e.g., Adh1-S introns 1, 2 and 6), the ubiquitin gene (Ubi1), the RuBisCO small subunit (rbcS) gene, the RuBisCO large subunit (rbcL) gene, the actin gene (e.g., actin-1 intron), the pyruvate dehydrogenase kinase gene (pdk), the nitrate reductase gene (nr), the duplicated carbonic anhydrase gene 1 (Tdcal), the psbA gene, the atpA gene, or any combination thereof. Example intron sequences can include, but are not limited to, SEQ ID NO:61 and SEQ ID NO:62.

[0134] In some embodiments, a polynucleotide and/or a nucleic acid construct of the invention can be an “expression cassette” or can be comprised within an expression cassette. As used herein, “expression cassette” means a recombinant nucleic acid molecule comprising, for example, a nucleic acid construct of the invention (e.g., a CRISPR-Cas effector protein, a reverse transcriptase polypeptide or domain, a flap endonuclease polypeptide or domain (e.g., FEN)), and/or a 5′-3′ exonuclease), wherein the nucleic acid construct is operably associated with at one or more control sequences (e.g., a promoter, terminator and the like). Thus, some embodiments of the invention provide expression cassettes designed to express, for example, a nucleic acid construct of the invention (e.g., a nucleic acid construct of the invention encoding a CRISPR-Cas effector protein or domain, a reverse transcriptase polypeptide or domain, a flap endonuclease polypeptide or domain and/or 5′-3′ exonuclease polypeptide or domain. When an expression cassette of the present invention comprises more than one polynucleotide, the polynucleotides may be operably linked to a single promoter that drives expression of all of the polynucleotides or the polynucleotides may be operably linked to one or more separate promoters (e.g., three polynucleotides may be driven by one, two or three promoters in any combination). When two or more separate promoters are used, the promoters may be the same promoter, or they may be different promoters. Thus, a polynucleotide encoding a CRISPR-Cas effector protein or domain, a polynucleotide encoding a reverse transcriptase polypeptide or domain, a polynucleotide encoding a flap endonuclease polypeptide or domain and/or a polynucleotide encoding a 5′-3′ exonuclease polypeptide or domain comprised in an expression cassette may each be operably linked to a separate promoter, or they may be operably linked to two or more promoters in any combination.

[0135] An expression cassette comprising a nucleic acid construct of the invention may be chimeric, meaning that at least one of its components is heterologous with respect to at least one of its other components (e.g., a promoter from the host organism operably linked to a polynucleotide of interest to be expressed in the host organism, wherein the polynucleotide of interest is from a different organism than the host or is not normally found in association with that promoter). An expression cassette may also be one that is naturally occurring but has been obtained in a recombinant form useful for heterologous expression.

[0136] An expression cassette can optionally include a transcriptional and/or translational termination region (i.e., termination region) and/or an enhancer region that is functional in the selected host cell. A variety of transcriptional terminators and enhancers are known in the art and are available for use in expression cassettes. Transcriptional terminators are responsible for the termination of transcription and correct mRNA polyadenylation. A termination region and/or the enhancer region may be native to the transcriptional initiation region, may be native, for example, to a gene encoding a CRISPR-Cas effector protein, a gene encoding a reverse transcriptase, a gene encoding a flap endonuclease, and/or a gene encoding a 5′-3′ exonuclease, may be native to a host cell, or may be native to another source (e.g., foreign or heterologous to the promoter, to a gene encoding a CRISPR-Cas effector protein, a gene encoding a reverse transcriptase, a gene encoding a flap endonuclease, and/or a gene encoding a 5′-3′ exonuclease, to the host cell, or any combination thereof).

[0137] An expression cassette of the invention also can include a polynucleotide encoding a selectable marker, which can be used to select a transformed host cell. As used herein, “selectable marker” means a polynucleotide sequence that when expressed imparts a distinct phenotype to the host cell expressing the marker and thus allows such transformed cells to be distinguished from those that do not have the marker. Such a polynucleotide sequence may encode either a selectable or screenable marker, depending on whether the marker confers a trait that can be selected for by chemical means, such as by using a selective agent (e.g., an antibiotic and the like), or on whether the marker is simply a trait that one can identify through observation or testing, such as by screening (e.g., fluorescence). Many examples of suitable selectable markers are known in the art and can be used in the expression cassettes described herein.

[0138] In addition to expression cassettes, the nucleic acid molecules/constructs and polynucleotide sequences described herein can be used in connection with vectors. The term “vector” refers to a composition for transferring, delivering, or introducing a nucleic acid (or nucleic acids) into a cell. A vector comprises a nucleic acid construct comprising the nucleotide sequence(s) to be transferred, delivered, or introduced. Vectors for use in transformation of host organisms are well known in the art. Non-limiting examples of general classes of vectors include viral vectors, plasmid vectors, phage vectors, phagemid vectors, cosmid vectors, fosmid vectors, bacteriophages, artificial chromosomes, minicircles, or Agrobacterium binary vectors in double or single stranded linear or circular form which may or may not be self-transmissible or mobilizable. In some embodiments, a viral vector can include, but is not limited, to a retroviral, lentiviral, adenoviral, adeno-associated, or herpes simplex viral vector. A vector as defined herein can transform a prokaryotic or eukaryotic host either by integration into the cellular genome or exist extrachromosomally (e.g., autonomous replicating plasmid with an origin of replication). Additionally included are shuttle vectors by which is meant a DNA vehicle capable, naturally or by design, of replication in two different host organisms, which may be selected from actinomycetes and related species, bacteria and eukaryotic (e.g., higher plant, mammalian, yeast or fungal cells). In some embodiments, the nucleic acid in the vector is under the control of, and operably linked to, an appropriate promoter or other regulatory elements for transcription in a host cell. The vector may be a bi-functional expression vector which functions in multiple hosts. In the case of genomic DNA, this may contain its own promoter and/or other regulatory elements and in the case of cDNA this may be under the control of an appropriate promoter and/or other regulatory elements for expression in the host cell. Accordingly, a nucleic acid construct or polynucleotide of this invention and/or expression cassettes comprising the same may be comprised in vectors as described herein and as known in the art.

[0139] As used herein, “contact,” “contacting,” “contacted,” and grammatical variations thereof, refer to placing the components of a desired reaction together under conditions suitable for carrying out the desired reaction (e.g., transformation, transcriptional control, genome editing, nicking, and/or cleavage). As an example, a target nucleic acid may be contacted with a Type II or Type V CRISPR-Cas effector protein, and a reverse transcriptase or a nucleic acid construct encoding the same, under conditions whereby the CRISPR-Cas effector protein and the reverse transcriptase are expressed and the CRISPR-Cas effector protein binds to the target nucleic acid, and the reverse transcriptase is either fused to the CRISPR-Cas effector protein or is recruited to the CRISPR-Cas effector protein (via, for example, a peptide tag fused to the CRISPR-Cas effector protein and an affinity tag fused to the reverse transcriptase) and thus, the reverse transcriptase is positioned in the vicinity of the target nucleic acid, thereby modifying the target nucleic acid. Other methods for recruiting a reverse transcriptase may be used that take advantage of other protein-protein interactions, and also RNA-protein interactions and chemical interactions.

[0140] As used herein, “modifying” or “modification” in reference to a target nucleic acid includes editing (e.g., mutating), covalent modification, exchanging/substituting nucleic acids/nucleotide bases, deleting, cleaving, nicking, and/or transcriptional control of a target nucleic acid. In some embodiments, a modification may include an indel of any size and/or a single base change (SNP) of any type.

[0141] “Introducing,” “introduce,” “introduced” (and grammatical variations thereof) in the context of a polynucleotide of interest means presenting a nucleotide sequence of interest (e.g., polynucleotide, a nucleic acid construct, and/or a guide nucleic acid) to a host organism or cell of said organism (e.g., host cell, e.g., a plant cell) in such a manner that the nucleotide sequence gains access to the interior of a cell.

[0142] The terms “transformation” or transfection” may be used interchangeably and as used herein refer to the introduction of a heterologous nucleic acid into a cell. Transformation of a cell may be stable or transient. Thus, in some embodiments, a host cell or host organism may be stably transformed with a polynucleotide/nucleic acid molecule of the invention. In some embodiments, a host cell or host organism may be transiently transformed with a nucleic acid construct of the invention.

[0143] “Transient transformation” in the context of a polynucleotide means that a polynucleotide is introduced into the cell and does not integrate into the genome of the cell.

[0144] By “stably introducing” or “stably introduced” in the context of a polynucleotide introduced into a cell is intended that the introduced polynucleotide is stably incorporated into the genome of the cell, and thus the cell is stably transformed with the polynucleotide.

[0145] “Stable transformation” or “stably transformed” as used herein means that a nucleic acid molecule is introduced into a cell and integrates into the genome of the cell. As such, the integrated nucleic acid molecule is capable of being inherited by the progeny thereof, more particularly, by the progeny of multiple successive generations. “Genome” as used herein includes the nuclear, mitochondrial and the plastid genomes, and therefore includes integration of the nucleic acid into, for example, the chloroplast or mitochondrial genome. Stable transformation as used herein can also refer to a transgene that is maintained extrachromasomally, for example, as a minichromosome or a plasmid.

[0146] Transient transformation may be detected by, for example, an enzyme-linked immunosorbent assay (ELISA) or Western blot, which can detect the presence of a peptide or polypeptide encoded by one or more transgene introduced into an organism. Stable transformation of a cell can be detected by, for example, a Southern blot hybridization assay of genomic DNA of the cell with nucleic acid sequences which specifically hybridize with a nucleotide sequence of a transgene introduced into an organism (e.g., a plant). Stable transformation of a cell can be detected by, for example, a Northern blot hybridization assay of RNA of the cell with nucleic acid sequences which specifically hybridize with a nucleotide sequence of a transgene introduced into a host organism. Stable transformation of a cell can also be detected by, e.g., a polymerase chain reaction (PCR) or other amplification reactions as are well known in the art, employing specific primer sequences that hybridize with target sequence(s) of a transgene, resulting in amplification of the transgene sequence, which can be detected according to standard methods. Transformation can also be detected by direct sequencing and/or hybridization protocols well known in the art.

[0147] Accordingly, in some embodiments, nucleotide sequences, polynucleotides, nucleic acid constructs, and/or expression cassettes of the invention may be expressed transiently and/or they can be stably incorporated into the genome of the host organism. Thus, in some embodiments, a nucleic acid construct of the invention (e.g., one or more expression cassettes encoding a DNA binding polypeptide or domain, an endonuclease polypeptide or domain, a reverse transcriptase polypeptide or domain, a flap endonuclease polypeptide or domain and/or nucleic acid modifying polypeptide or domain) may be transiently introduced into a cell with a guide nucleic acid and as such, no DNA maintained in the cell.

[0148] A nucleic acid construct of the invention can be introduced into a cell by any method known to those of skill in the art. In some embodiments of the invention, transformation of a cell comprises nuclear transformation. In other embodiments, transformation of a cell comprises plastid transformation (e.g., chloroplast transformation). In still further embodiments, the recombinant nucleic acid construct of the invention can be introduced into a cell via conventional breeding techniques.

[0149] Procedures for transforming both eukaryotic and prokaryotic organisms are well known and routine in the art and are described throughout the literature (See, for example, Jiang et al. 2013. Nat. Biotechnol. 31:233-239; Ran et al. Nature Protocols 8:2281-2308 (2013)).

[0150] A nucleotide sequence therefore can be introduced into a host organism or its cell in any number of ways that are well known in the art. The methods of the invention do not depend on a particular method for introducing one or more nucleotide sequences into the organism, only that they gain access to the interior of at least one cell of the organism. Where more than one nucleotide sequence is to be introduced, they can be assembled as part of a single nucleic acid construct, or as separate nucleic acid constructs, and can be located on the same or different nucleic acid constructs. Accordingly, the nucleotide sequences can be introduced into the cell of interest in a single transformation event, and/or in separate transformation events, or, alternatively, where relevant, a nucleotide sequence can be incorporated into a plant, for example, as part of a breeding protocol.

[0151] Base editing has been shown to be an efficient way to change cytosine and adenine residues to thymine and guanine, respectively. These tools, while powerful, do have some limitations such as bystander bases, small base editing windows, and limited PAMs.

[0152] To perform precise templated editing in cells there are several essential steps, each of which has rate limitations that together can severely hamper the ability to effectively perform editing due to low efficiencies. For example, one step requires inducing the cell to initiate a repair event at the target site. This is typically performed by causing a double-strand break (DSB) or nick by an exogenously provided, sequence-specific nuclease or nickase. Another step requires local availability of a homologous template to be used for the repair. This step requires the template to be in the proximity of the DSB at exactly the right time when the DSB is competent to commit to a templated editing pathway. In particular, this step is widely regarded to be the rate limiting step with current editing technologies. A further step is the efficient incorporation of sequence from the template into the broken or nicked target. Prior to the present invention, this step was typically provided by the cell's endogenous DNA repair enzymes. The efficiency of this step is low and difficult to manipulate. The present invention bypasses many of the major obstacles to the efficiency of the process of templated editing by co-localizing, in a coordinate fashion, the functionalities required to carry out the steps described above.

[0153] FIG. 1 shows the generation of DNA sequences from reverse transcription off the crRNA and subsequent integration into the nick site using methods and constructs of the present invention. An extended crRNA is shown in blue and is bound to the second strand nickase Cpf1 (Cas12a) (nCpf1, upper left). As described in more detail herein, the nCpf1 may be either covalently linked via, for example, a peptide to a reverse transcriptase (RT) or the RT may be recruited to the nCpf1 (e.g., via the use of a peptide tag motif/affinity polypeptide that binds to the peptide tag or via chemical interactions as described herein), in which case multiple reverse transcriptase proteins (RTⁿ) may be recruited. The 3′ end of the guide RNA is complimentary to the DNA at the nick site (non-bold pairing lines, upper left). The RT then polymerizes DNA from the 3′ end of the DNA nick generating a DNA sequence complimentary to the RNA with nucleotides non-complimentary to the genome (bold pairing lines, brackets, upper right) followed by complimentary nucleotides (non-bold pairing lines, upper right). Upon dissociation, the resultant DNA has an extended ssDNA with a 3′ overhang which is largely the same sequence as the original DNA (non-bold pairing lines, lower right) but with some non-native nucleotides (bold pairing lines, brackets, lower right). This flap is in equilibrium with a structure having a 5′ overhang (lower left) where there are mismatched nucleotides incorporated into the DNA. This equilibrium lies more to the favorable perfect pairing on the right but can be driven may be reduced in a variety of ways including, for example, nicking the second strand (e.g., non-target strand or top strand). The structure on the left may be preferentially cleaved by cellular flap endonucleases involved in DNA lagging strand synthesis, which are highly conserved between mammalian and plant cells (the amino acid sequence of Homo sapiens FEN1 is over 50% identical to both Zea mays and Glycine max FEN1). In some embodiments, a flap endonuclease may be introduced to drive the equilibrium in the direction of the 3′ flap comprising the non-native/mismatched nucleotides. Longer 5′ flaps are often removed in eukaryotic cells by the Dna2 protein, again driving the equilibrium to the 3′ flap (desired) product (see, e.g., Nucleic Acids Res. 2012 August; 40(14):6774-86).

[0154] Further in the process of the present invention, and as exemplified in FIG. 2, to reduce mismatch repair and to drive the equilibrium more in favor of forming the final product with the modified nucleotides (bold, brackets), a Cpf1 nickase may be targeted to regions outside of the RT-editing region (lightning bolts) as described herein. The nCpf1:crRNA molecules may be on either side or both sides of the editing bubble. Nicking the first strand (e.g., target strand or bottom strand of FIG. 2) (dashed line) indicates to the cell that the newly incorporated nucleotides are the correct nucleotides during mismatch repair and replication, thus favoring a final product with the new nucleotides.

[0155] Variants of the reverse transcriptase (RT) enzyme can have significant effects on the temperature-sensitivity and processivity of the editing system. Natural and rationally- and non-rationally engineered (i.e., directed evolution) variants of the RT can be useful in optimizing activity in plant-preferred temperatures and for optimizing processivity profiles.

[0156] Protein domain fusions to an RT polypeptide can have significant effects on the temperature-sensitivity and processivity of the editing system. The RT enzyme can be improved for temperature-sensitivity, processivity, and template affinity through fusions to ssRNA binding domains (RBDs). These RBDs may have sequence specificity, non-specificity or sequence preferences (see, e.g., SEQ ID NOs:37-52). A range of affinity distributions may be beneficial to editing in different cellular and in vitro environments. RBDs can be modified in both specificity and binding free energy through increasing or decreasing the size of the RBD in order to recognize more or fewer nucleotides. Multiple RBDs result in proteins with affinity distributions that are a combination of the individual RBDs. Adding one or more RBD to the RT enzyme can result in increased affinity, increased or decreased sequence specificity, and/or promote cooperativity.

[0157] An RT polypeptide for use with this invention may be fused with a single-stranded RNA binding protein (RBD). An RBD useful with this invention may be an RBD obtained from, for example, a human, a mouse or a fly. A single-stranded binding protein can comprise an amino acid sequence that includes, but is not limited to, any one of SEQ ID NOs:37-52.

[0158] After reverse transcriptase incorporates an edit into the genome, a sequence redundancy exists between the newly synthesized edited sequence and the original WT sequence it is intended to replace. This leads to either a 5′ or 3′ flap at the target site, which has to be repaired by the cell. The two states exist in equilibrium with binding energy favoring the 3′ flap because more base pairs are available when the WT sequence is paired with its complement than when the edited strand is paired with its complement. This is unfavorable for efficient editing because processing (removal) of the 3′ flap may remove the edited residues and revert the target back to WT sequence. However, cellular flap endonucleases such as FEN1 or Dna2 can efficiently process 5′ flaps. Thus, instead of relying on the function of 5′-flap endonucleases native to the cell, in some embodiments of this invention the concentration of flap endonucleases at the target may be increased to further favor the desirable equilibrium outcome (removal of the WT sequence in the 5′ flap so that the edited sequence becomes stably incorporated at the target site). This may be achieved by overexpression of a 5′ flap endonuclease as a free protein in the cell. Alternatively, FEN or Dna2 may be actively recruited to the target site by association with the CRISPR complex, either by direct protein fusion or by non-covalent recruitment such as with a peptide tag and affinity polypeptide pair (e.g., a SunTag antibody/epitope pair) or chemical interactions as described herein.

[0159] The present invention further provides method for modifying a target nucleic acid using the proteins/polypeptides, and/or fusion proteins of the invention and polynucleotides and nucleic acid constructs encoding the same, and/or expression cassettes and/or vectors comprising the same. The methods may be carried out in an in vivo system (e.g., in a cell or in an organism) or in an in vitro system (e.g., cell free). Thus, in some embodiments, a method of modifying a target nucleic acid in a plant cell is provided, the method comprising: contacting the target nucleic acid with (a) a Type V CRISPR-Cas effector protein or a Type II CRISPR-Cas effector protein; (b) a reverse transcriptase, and (c) an extended guide nucleic acid (e.g., extended Type II or Type V CRISPR RNA, extended Type II or Type V CRISPR DNA, extended Type II or Type V crRNA, extended Type II or Type V crDNA; e.g., tagRNA, tagDNA), thereby modifying the target nucleic acid. In some embodiments, the Type V CRISPR-Cas effector protein or Type II CRISPR-Cas effector protein, the reverse transcriptase, and the extended guide nucleic acid may form a complex or may be comprised in a complex, which is capable of interacting with the target nucleic acid. In some embodiments, the method of the invention may further comprise contacting the target nucleic acid with: (a) a second Type V CRISPR-Cas effector protein or a second Type II CRISPR-Cas effector protein; (b) a second reverse transcriptase, and (c) a second extended guide nucleic acid (e.g., extended CRISPR RNA, extended CRISPR DNA, extended crRNA, extended crDNA; e.g., tagDNA, tagRNA), wherein the second extended guide nucleic acid targets (spacer is substantially complementary to/binds to) a site on the first strand of the target nucleic acid, thereby modifying the target nucleic acid. In some embodiments, the method of the invention may further comprise contacting the target nucleic acid with: (a) a second Type V CRISPR-Cas effector protein or a second Type II CRISPR-Cas effector protein; (b) a second reverse transcriptase, and (c) a second extended guide nucleic acid (e.g., extended CRISPR RNA, extended CRISPR DNA, extended crRNA, extended crDNA; e.g., tagDNA, tagRNA), wherein the second extended guide nucleic acid targets (spacer is substantially complementary to/binds to) a site on the second strand of the target nucleic acid, thereby modifying the target nucleic acid. In some embodiments, the methods of the invention comprise contacting the target nucleic acid at a temperature of about 20° C. to 42° C. (e.g., about 20, 21, 22, 23, 24, 25, 26, 27, 28, 29, 30, 31, 32, 33, 34, 35, 36, 37, 38, 39, 40, 41, or 42° C., and any value or range therein). In some embodiments, a target nucleic acid may be contacted with additional polypeptides and/or nucleic acid constructs encoding the same in order to improve mismatch repair. In some embodiments, a method of the invention may further comprise contacting the target nucleic acid with (a) a CRISPR-Cas effector protein; and (b) a guide nucleic acid, wherein (i) the CRISPR-Cas effector protein is a nickase (e.g., nCas9, nCas12a) and nicks a site on the first strand of the target nucleic acid that is located about 10 to about 125 base pairs (e.g., about 10, 11, 12, 13, 14, 15, 16, 17, 18, 19, 20, 21, 22, 23, 24, 25, 26, 27, 28, 29, 30, 31, 32, 33, 34, 35, 36, 37, 38, 39, 40, 41, 42, 43, 44, 45, 46, 47, 48, 49, 50, 51, 52, 53, 54, 55, 56, 57, 58, 59, 60, 61, 62, 63, 64, 65, 66, 67, 68, 69, 70, 71, 72, 73, 74, 75, 76, 77, 78, 79, 80, 81, 82, 83, 84, 85, 86, 87, 88, 89, 90, 91, 92, 93, 94, 95, 96, 97, 98, 99, 100, 101, 102, 103, 104, 105, 106, 107, 108, 109, 110, 111, 112, 113, 114, 115, 116, 117, 118, 119, 120, 121, 122, 123, 124, or 125 base pairs, or any range or value therein) that is either 5′ or 3′ from a site on the second strand that has been nicked by the Type II or Type V CRISPR-Cas effector protein, or (ii) the CRISPR-Cas effector protein is a nickase (e.g., nCas9, nCas12a) and nicks a site on the second strand of the target nucleic acid that is located about 10 to about 125 base pairs (either 5′ or 3′) from a site on the first strand that has been nicked by the Type II or Type V CRISPR-Cas effector protein, thereby improving mismatch repair. In some embodiments, nicking the second strand (non-target strand) of the target nucleic acid comprises contacting the target nucleic acid with a crRNA comprising a spacer having mismatches (e.g., about 1, 2, 3, or 4 mismatches; e.g., about 80-96% complementary to the second strand (non-target strand)). In this configuration, the nicking does not alter the equilibrium but rather mismatch product species formation will be favored because 5′ flap will be preferentially processed in the cell. Nicking of non-target strand enhances the resolution of the next step, which is when the mismatch repair is involved.

[0160] Thus, in some embodiments, at least two RNAs may be utilized with the methods of the invention: a tagRNA which guides the CRISPR-Cas effector protein to the right spot and makes a double-strand break using a perfect RNA:DNA match and a second RNA (crRNA) which anneals to the DNA very close by on the same strand. This second RNA (crRNA) has a spacer sequence comprising a couple of mismatches (not fully complementary, e.g., about 1, 2, 3, or 4 mismatches, e.g., about 80% to about 96% (80, 81, 82, 83, 84, 85, 86, 87, 88, 89, 90, 91, 92, 93, 94, 95, 96%) complementarity. This results in the CRISPR-Cas effector protein nicking the non-target strand. Without intending to be limited to any particular theory, it is believed that following nicking, there are cellular nucleases which chew back some of the non-target strand. Without the non-target strand there is no blueprint for “fixing” the edit that we are making with the methods of the invention (REDRAW), resulting in greater editing efficiency. In this configuration, only one fusion enzyme is ued, but it is capable of binding the two different RNAs (tagRNA and crRNA).

[0161] In some embodiments, an extended guide nucleic acid comprises: (i) a Type V CRISPR nucleic acid or Type II CRISPR nucleic acid (Type II or Type V CRISPR RNA, Type II or Type V CRISPR DNA, Type II or Type V crRNA, Type II or Type V crDNA) and/or a CRISPR nucleic acid and a tracr nucleic acid (e.g., Type II or Type V tracrRNA, Type II or Type V tracrDNA); and (ii) an extended portion comprising a primer binding site and a reverse transcriptase template (RT template). In some embodiments, the extended portion can be fused to either the 5′ end or 3′ end of the CRISPR nucleic acid (e.g., 5′ to 3′: repeat-spacer-extended portion, or extended portion-repeat-spacer) and/or to the 5′ or 3′ end of the tracr nucleic acid. In some embodiments, the extended portion of an extended guide nucleic acid comprises, 5′ to 3′, an RT template (RTT) and a primer binding site (PBS) (e.g., 5′-crRNA-spacer-RTT(edit encoded)-PBS-3′) or comprises 5′ to 3′ a PBS and RTT, depending on the location of the extended portion relative to the CRISPR RNA of the guide (e.g., 5′-crRNA-spacer-PBS-RTT(edit encoded)-3′). In some embodiments, a target nucleic acid is double stranded and comprises a first strand and a second strand and the primer binding site binds to the second strand (non-target, top strand) of the target nucleic acid. In some embodiments, a target nucleic acid is double stranded and comprises a first strand and a second strand and the primer binding site binds to the first strand (e.g., binds to the target strand, same strand to which the CRISPR-Cas effector protein is recruited, bottom strand) of the target nucleic acid. In some embodiments, a target nucleic acid is double stranded and comprises a first strand and a second strand and the primer binding site binds to the second strand (non-target strand, opposite strand from that to which the CRISPR-Cas effector protein is recruited) of the target nucleic acid. Thus, in some embodiments, the editing reverse transcriptase (RT) adds to the target strand (the strand to which the spacer of the CRISPR RNA is complementary and to which the CRISPR-Cas effector protein is recruited) and in some embodiments, the editing reverse transcriptase (RT) adds to the non-target strand (the strand that is complementary to the strand to which the spacer of the CRISPR RNA is complementary and to which the CRISPR-Cas effector protein is recruited).

[0162] The RT template encodes a modification to be incorporated into the target nucleic acid (the edit). The modification of edit may be located in any position within an RT template (position location relative to the position of a protospacer adjacent motif (PAM) of the target nucleic acid). Thus, for example, FIG. 27 shows an RT template having edits located at positions −1-19 (−1, 1, 2, 3, 4, 5, 6, 7, 8, 9, 10, 11, 12, 13, 14, 15, 16, 27, 18, or 19) relative to the position of a protospacer adjacent motif (PAM) (TTTG) in the target nucleic acid. In each case, precise editing was observed. In some embodiments, an RT template may comprise an edit located at nucleotide position −1, 1, 2, 3, 4, 5, 6, 7, 8, 9, 10, 11, 12, 13, 14, 15, 16, 27, 18, or 19. In some embodiments, an RT template may comprise an edit located at nucleotide position 4 to nucleotide position 17 (e.g., position 4, 5, 6, 7, 8, 9, 10, 11, 12, 13, 14, 15, 16, or 17) of the RT template relative to the position of a protospacer adjacent motif (PAM) of the target nucleic acid. In some embodiments, an RT template may comprise an edit located at nucleotide position 10 to nucleotide position 17 (e.g., position 10, 11, 12, 13, 14, 15, 16, or 17) of the RT template relative to the position of a protospacer adjacent motif (PAM) of the target nucleic acid. In some embodiments, an RT template may comprise an edit located at nucleotide position 12 to nucleotide position 15 (e.g., position 12, 13, 14, or 15) of the RT template relative to the position of a protospacer adjacent motif (PAM) of the target nucleic acid.

[0163] In some embodiments, a method of modifying a target nucleic acid having a first strand and a second strand is provided, the method comprising: contacting the target nucleic acid with (a) a Type V CRISPR-Cas effector protein or a Type II CRISPR-Cas effector protein; (b) a reverse transcriptase, and (c) an extended guide nucleic acid (e.g., extended Type II or Type V CRISPR RNA, extended Type II or Type V CRISPR DNA, extended Type II or Type V crRNA, extended Type II or Type V crDNA), wherein the extended guide nucleic acid comprises: (i) a Type II or Type V CRISPR nucleic acid (Type II or Type V CRISPR RNA, Type II or Type V CRISPR DNA, Type II or Type V crRNA, Type II or Type V crDNA) and/or a CRISPR nucleic acid and a tracr nucleic acid (e.g., Type II or Type V tracrRNA, Type II or Type V tracrDNA); and (ii) an extended portion comprising a primer binding site and a reverse transcriptase template (RT template), and the Type II or Type V CRISPR nucleic acid comprises a spacer that binds to the first strand (e.g., target strand) (i.e., is complementary to a portion of consecutive nucleotides in the first strand of the target nucleic acid) and the primer binding site binds to the first strand (target strand), thereby modifying the target nucleic acid. In some embodiments, a Type II CRISPR-Cas effector protein can be a Cas9 polypeptide, optionally a spCas9. In some embodiments, a Type V CRISPR-Cas effector protein can be a Cas12a polypeptide or a cas12b polypeptide. In some embodiments, a Type II or Type V CRISPR-Cas effector protein, a reverse transcriptase, and an extended guide nucleic acid can form a complex or are comprised in a complex. In some embodiments, contacting can further comprise contacting the target nucleic acid with a 5′-3′ exonuclease.

[0164] In some embodiments, the target nucleic acid may be additionally contacted with a 5′ flap endonuclease (FEN), optionally an FEN1 and/or Dna2 polypeptide, thereby improving mismatch repair by removing the 5′ flap that does not comprise the edits to be incorporated into the target nucleic acid. In some embodiments, an FEN and/or Dna2 may be overexpressed in the presence of the target nucleic acid. In some embodiments, an FEN may be a fusion protein comprising an FEN domain fused to a Type V CRISPR-Cas effector protein or domain, thereby recruiting the FEN to the target nucleic acid.

[0165] In some embodiments, a Dna2 may be a fusion protein comprising a Dna2 domain fused to a Type V CRISPR-Cas effector protein or domain, thereby recruiting the Dna2 to the target nucleic acid.

[0166] In some embodiments, a Type II or Type V CRISPR-Cas effector protein may be a Type II or Type V CRISPR-Cas fusion protein comprising a Type V CRISPR-Cas effector protein domain fused (linked) to a peptide tag (e.g., an epitope or a multimerized epitope) and an FEN may be an FEN fusion protein comprising an FEN domain fused to an affinity polypeptide that binds to the peptide tag, thereby recruiting the FEN to the Type II or Type V CRISPR-Cas effector protein domain, and the target nucleic acid. In some embodiments, a Type II or Type V CRISPR-Cas effector protein may be a Type II or Type V CRISPR-Cas fusion protein comprising a Type II or Type V CRISPR-Cas effector protein domain fused (linked) to a peptide tag (e.g., an epitope or a multimerized epitope) and a Dna2 may be a Dna2 fusion protein comprising a Dna2 domain fused to an affinity polypeptide that binds to the peptide tag, thereby recruiting the Dna2 to the Type II or Type V CRISPR-Cas effector protein domain, and the target nucleic acid. In some embodiments, a Type V CRISPR-Cas effector protein may be a Type II or Type V CRISPR-Cas fusion protein comprising a Type II or Type V CRISPR-Cas effector protein domain fused (linked) to a peptide tag (e.g., an epitope or a multimerized epitope) and an FEN may be an FEN fusion protein comprising an FEN domain fused to an affinity polypeptide that binds to the peptide tag, thereby recruiting the FEN to the Type II or Type V CRISPR-Cas effector protein domain, and the target nucleic acid. In some embodiments, a Type II or Type V CRISPR-Cas effector protein may be a Type II or Type V CRISPR-Cas fusion protein comprising a Type II or Type V CRISPR-Cas effector protein domain fused (linked) to a peptide tag (e.g., an epitope or a multimerized epitope) and a Dna2 may be a Dna2 fusion protein comprising a Dna2 domain fused to an affinity polypeptide that binds to the peptide tag, thereby recruiting the Dna2 to the Type II or Type V CRISPR-Cas effector protein domain, and the target nucleic acid. In some embodiments, a target nucleic acid may be contacted with two or more FEN fusion proteins and/or Dna2 fusion proteins.

[0167] In some embodiments, the methods of the invention may further comprise contacting the target nucleic acid with a 5′-3′ exonuclease, thereby improving mismatch repair by removing the 5′ flap that does not comprise the edits (non-edited strand) to be incorporated into the target nucleic acid. In some embodiments, a 5′-3′ exonuclease may be fused to a Type II or Type V CRISPR-Cas effector protein, optionally to a Type II or Type V CRISPR-Cas fusion protein. In some embodiments, a 5′-3′ exonuclease may be a fusion protein comprising the 5′-3′ exonuclease fused to a peptide tag and a Type II or Type V CRISPR-Cas effector protein may be a fusion protein comprising a Type II or Type V CRISPR-Cas effector protein domain fused to an affinity polypeptide that is capable of binding to the peptide tag, thereby improving mismatch repair. In some embodiments, a 5′-3′ exonuclease may be a fusion protein comprising a 5′-3′ exonuclease fused to an affinity polypeptide that is capable of binding to the peptide tag and a Type II or Type V CRISPR-Cas effector protein may be a fusion protein comprising a Type II or Type V CRISPR-Cas effector protein domain fused to a peptide tag. In some embodiments, a 5′-3′ exonuclease may be a fusion protein comprising a 5′-3′ exonuclease fused to an affinity polypeptide that is capable of binding to an RNA recruiting motif and the extended guide nucleic acid is linked to an RNA recruiting motif, thereby recruiting the 5′-3′ exonuclease to the target nucleic acid via interaction between the affinity polypeptide and RNA recruiting motif. A 5′-3′ exonuclease may be any known or later discovered 5′-3′ exonuclease functional in the organism, cell or in vitro system of interest. In some embodiments, a 5′-3′ exonuclease can include but is not limited to, a RecE exonuclease (RecE, e.g., SEQ ID NO:129), a RecJ exonuclease (RecJ, e.g., SEQ ID NO:130), a T5 exonuclease (T5_Exo, e.g., SEQ ID NO:131), and/or a T7 exonuclease (T7_Exo, e.g., SEQ ID NO:132), Lambda exonuclease (Lambda Exo, e.g., SEQ ID NO:133), E. coli exonuclease sbcB (SEQ ID NO:134) and/or human exonuclease (Exo, e.g., SEQ ID NO:135). In some embodiments, a RecE exonuclease C-terminal fragment flanked on both sides with nuclear localization sequences (NLS) from, for example, Escherichia coli (strain K12) may be used (SEQ ID NO:98). In some embodiments, a RecJ exonuclease flanked on both sides with nuclear localization sequences (NLS) from, for example, Escherichia coli (strain K12) may be used (SEQ ID NO:99). In some embodiments, a T5 exonuclease flanked on both sides with nuclear localization sequences (NLS) may be used (SEQ ID NO:100).). In some embodiments, a T7 exonuclease flanked on both sides with nuclear localization sequences (NLS) from, for example, Escherichia phage 7 may be used (SEQ ID NO:101). In some embodiments, a 5′-3′ exonuclease includes, but is not limited to, a RecE (e.g., SEQ ID NO:129), RecJ (e.g., SEQ ID NO:130), T5_Exo (e.g., SEQ ID NO:131), T7_Exo (e.g., SEQ ID NO:132), sbcB (SEQ ID NO:134) and/or Exo (SEQ ID NO:135).

[0168] In some embodiments, the methods of the invention may further comprise reducing double strand breaks. In some embodiments, reducing double strand breaks may be carried out by introducing, in the region of the target nucleic acid, a chemical inhibitor of non-homologous end joining (NHEJ), or by introducing a CRISPR guide nucleic acid, or an siRNA targeting an NHEJ protein to transiently knock-down expression of the NHEJ protein. In some embodiments, an inhibitor of NJEH may be fused to the reverse transcriptase (RT) or the CRISPR-Cas effector protein of the invention, optionally to the N-terminal end of the RT or CRISPR-Cas effector protein. In some embodiments, an inhibitor of NHEJ includes, but is not limited to, Escherichia phage Mu Gam (SEQ ID NO:147).

[0169] In some embodiments, a Type II or Type V CRISPR-Cas effector protein may be a fusion protein and/or the reverse transcriptase may be a fusion protein, wherein the Type II or Type V CRISPR-Cas fusion protein, the reverse transcriptase fusion protein and/or the extended guide nucleic acid may be fused to one or more components, which allow for the recruiting the reverse transcriptase to the Type II or Type V CRISPR-Cas effector protein. In some embodiments, the one or more components recruit via protein-protein interactions, protein-RNA interactions, and/or chemical interactions.

[0170] Thus, in some embodiments, a Type V CRISPR-Cas effector protein may be a Type V CRISPR-Cas effector fusion protein comprising a Type V CRISPR-Cas effector protein domain fused (linked) to a peptide tag (e.g., an epitope or a multimerized epitope) and the reverse transcriptase may be a reverse transcriptase fusion protein comprising a reverse transcriptase domain fused (linked) to an affinity polypeptide that binds to the peptide tag, wherein the Type V CRISPR-Cas effector protein interacts with the guide nucleic acid, which guide nucleic acid binds to the target nucleic acid, thereby recruiting the reverse transcriptase to the Type V CRISPR-Cas effector protein and to the target nucleic acid. In some embodiments, the Type II CRISPR-Cas effector protein is a Type II CRISPR-Cas fusion protein comprising a Type II CRISPR-Cas effector protein domain fused (linked) to a peptide tag (e.g., an epitope or a multimerized epitope) and the FEN is an FEN fusion protein comprising an FEN domain fused to an affinity polypeptide that binds to the peptide tag, and/or wherein the Type II CRISPR-Cas effector protein is a Type II CRISPR-Cas fusion protein comprising a Type II CRISPR-Cas effector protein domain fused to a peptide tag and the Dna2 polypeptide is an Dna2 fusion protein comprising an Dna2 domain fused to an affinity polypeptide that binds to the peptide tag, optionally wherein the target nucleic acid is contacted with two or more FEN fusion proteins and/or two or more Dna2 fusion proteins, thereby recruiting the FEN and/or Dna2 to the Type II CRISPR-Cas effector protein domain, and the target nucleic acid. In some embodiments, two or more reverse transcriptase fusion proteins may be recruited to the Type II or Type V CRISPR-Cas effector protein, thereby contacting the target nucleic acid with two or more reverse transcriptase fusion proteins.

[0171] A peptide tag may include, but is not limited to, a GCN4 peptide tag (e.g., Sun-Tag), a c-Myc affinity tag, an HA affinity tag, a His affinity tag, an S affinity tag, a methionine-His affinity tag, an RGD-His affinity tag, a FLAG octapeptide, a strep tag or strep tag II, a V5 tag, and/or a VSV-G epitope. Any epitope that may be linked to a polypeptide and for which there is a corresponding affinity polypeptide that may be linked to another polypeptide may be used with this invention. In some embodiments, a peptide tag may comprise 1 or 2 or more copies of a peptide tag (e.g., epitope, multimerized epitope (e.g., tandem repeats)) (e.g., 1, 2, 3, 4, 5, 6, 7, 8, 9, 10, 11, 12, 13, 14, 15, 16, 17, 18, 19, 20, 21, 22, 23, 24, 25 or more peptide tags. In some embodiments, an affinity polypeptide that binds to a peptide tag may be an antibody. In some embodiments, the antibody may be a scFv antibody. In some embodiments, an affinity polypeptide that binds to a peptide tag may be synthetic (e.g., evolved for affinity interaction) including, but not limited to, an affibody, an anticalin, a monobody and/or a DARPin (see, e.g., Sha et al., Protein Sci. 26(5):910-924 (2017)); Gilbreth (Curr Opin Struc Biol 22(4):413-420 (2013)), U.S. Pat. No. 9,982,053, each of which are incorporated by reference in their entireties for the teachings relevant to affibodies, anticalins, monobodies and/or DARPins. Example peptide tag sequences and their affinity polypeptides include, but are not limited to, the amino acid sequences of SEQ ID NOs:23-25.

[0172] In some embodiments, an extended guide nucleic acid may be linked to an RNA recruiting motif, and the reverse transcriptase may be a reverse transcriptase fusion protein, wherein the reverse transcriptase fusion protein may comprise a reverse transcriptase domain fused to an affinity polypeptide that binds to the RNA recruiting motif, wherein the extended guide binds to the target nucleic acid and the RNA recruiting motif binds to the affinity polypeptide, thereby recruiting the reverse transcriptase fusion protein to the extended guide and contacting the target nucleic acid with the reverse transcriptase domain. In some embodiments, two or more reverse transcriptase fusion proteins may be recruited to an extended guide nucleic acid, thereby contacting the target nucleic acid with two or more reverse transcriptase fusion proteins. Example RNA recruiting motifs and their affinity polypeptides include, but are not limited to, the sequences of SEQ ID NOs:26-36.

[0173] In some embodiments, an RNA recruiting motif may be located on the 3′ end of the extended portion of the extended guide nucleic acid (e.g., 5′-3′, repeat-spacer-extended portion (RT template-primer binding site)-RNA recruiting motif). In some embodiments, an RNA recruiting motif may be embedded in the extended portion.

[0174] In some embodiments of the invention, an extended guide RNA and/or guide RNA may be linked to one or to two or more RNA recruiting motifs (e.g., 1, 2, 3, 4, 5, 6, 7, 8, 9, 10 or more motifs, e.g., at least 10 to about 25 motifs), optionally wherein the two or more RNA recruiting motifs may be the same RNA recruiting motif or different RNA recruiting motifs. In some embodiments, an RNA recruiting motif and corresponding affinity polypeptide may include, but is not limited, to a telomerase Ku binding motif (e.g., Ku binding hairpin) and the corresponding affinity polypeptide Ku (e.g., Ku heterodimer), a telomerase Sm7 binding motif and the corresponding affinity polypeptide Sm7, an MS2 phage operator stem-loop and the corresponding affinity polypeptide MS2 Coat Protein (MCP), a PP7 phage operator stem-loop and the corresponding affinity polypeptide PP7 Coat Protein (PCP), an SfMu phage Com stem-loop and the corresponding affinity polypeptide Com RNA binding protein, a PUF binding site (PBS) and the affinity polypeptide Pumilio/fem-3 mRNA binding factor (PUF), and/or a synthetic RNA-aptamer and the aptamer ligand as the corresponding affinity polypeptide. In some embodiments, the RNA recruiting motif and corresponding affinity polypeptide may be an MS2 phage operator stem-loop and the affinity polypeptide MS2 Coat Protein (MCP). In some embodiments, the RNA recruiting motif and corresponding affinity polypeptide may be a PUF binding site (PBS) and the affinity polypeptide Pumilio/fem-3 mRNA binding factor (PUF).

[0175] In some embodiments, the components for recruiting polypeptides and nucleic acids may those that function through chemical interactions that may include, but are not limited to, rapamycin-inducible dimerization of FRB—FKBP; Biotin-streptavidin; SNAP tag; Halo tag; CLIP tag; DmrA-DmrC heterodimer induced by a compound; bifunctional ligand (e.g., fusion of two protein-binding chemicals together, e.g., dihyrofolate reductase (DHFR).

[0176] In some embodiments of the invention, a CRISPR-Cas effector protein (e.g., a CRISPR-Cas effector protein, a first CRISPR-Cas effector protein, a second CRISPR-Cas effector protein, a third CRISPR-Cas effector protein, and/or a fourth CRISPR-Cas effector protein) may be from a Type I CRISPR-Cas system, a Type II CRISPR-Cas system, a Type III CRISPR-Cas system, a Type IV CRISPR-Cas system and/or a Type V CRISPR-Cas system. In some embodiments, the CRISPR-Cas nuclease is from a Type II CRISPR-Cas system or a Type V CRISPR-Cas system.

[0177] In some embodiments of the invention, a CRISPR-Cas effector protein may be a Cas9, C2c1, C2c3, Cas12a (also referred to as Cpf1), Cas12b, Cas12c, Cas12d, Cas12e, Cas13a, Cas13b, Cas13c, Cas13d, Cas1, Cas1B, Cas2, Cas3, Cas3′, Cas3″, Cas4, Cas5, Cas6, Cas7, Cas8, Cas9 (also known as Csn1 and Csx12), Cas10, Csy1, Csy2, Csy3, Cse1, Cse2, Csc1, Csc2, Csa5, Csn2, Csm2, Csm3, Csm4, Csm5, Csm6, Cmr1, Cmr3, Cmr4, Cmr5, Cmr6, Csb1, Csb2, Csb3, Csx17, Csx14, Csx10, Csx16, CsaX, Csx3, Csx1, Csx15, Csf1, Csf2, Csf3, Csf4 (dinG), and/or Csf5 nuclease, optionally wherein the CRISPR-Cas nuclease may be a Cas9, Cas12a (Cpf1), Cas12b, Cas12c (C2c3), Cas12d (CasY), Cas12e (CasX), Cas12g, Cas12h, Cas12i, C2c4, C2c5, C2c8, C2c9, C2c10, Cas14a, Cas14b, and/or Cas14c nuclease.

[0178] In some embodiments, a CRISPR-Cas effector protein may be a protein that functions as a nickase (e.g., a Cas9 nickase or a Cas12a nickase). In some embodiments, a CRISPR-Cas effector protein useful with the invention may comprise a mutation in its nuclease active site (e.g., RuvC, HNH, e.g., RuvC site of a Cas12a nuclease domain, e.g., RuvC site and/or HNH site of a Cas9 nuclease domain). A CRISPR-Cas effector protein having a mutation in its nuclease active site, and therefore, no longer comprising nuclease activity, is commonly referred to as “dead,” or “deactivated” e.g., dCas. In some embodiments, a CRISPR-Cas nuclease domain or polypeptide having a mutation in its nuclease active site may have impaired activity or reduced activity as compared to the same CRISPR-Cas nuclease without the mutation. In some embodiments, a CRISPR-Cas effector protein useful with the invention may be a double stranded nuclease. In some embodiments, a CRISPR-Cas effector protein having double stranded nuclease activity may be a Type II or a Type V CRISPR-Cas effector protein. In some embodiments, a Type V CRISPR-Cas effector protein having double stranded nuclease activity is a Cas12a polypeptide. In some embodiments, a Type II CRISPR-Cas effector protein having double stranded nuclease activity is a Cas9 polypeptide.

[0179] In some embodiments, a CRISPR-Cas effector protein may be a Type V CRISPR-Cas effector protein. In some embodiments, a Type V CRISPR-Cas effector protein may comprise a Cas12a (Cpf1), Cas12b (C2c1), Cas12c (C2c3), Cas12d (CasY), Cas12e (CasX), Cas12g, Cas12h, Cas12i, C2c4, C2c5, C2c8, C2c9, C2c10, Cas14a, Cas14b, and/or Cas14c effector protein and/or domain.

[0180] In some embodiments, a Cas12a (Cpf1) can include, but is not limited to, LbCas12a, Lb2Cas12a, Lb3Cas12a, AsCas12a, BpCas12a, CMtCas12a, EeCas12a, FnCas12a, LiCas12a, MbCas12a, PbCas12a, PcCas12a, PdCas12a, PeCas12a, PmCas12a, SsCas12a, enAsCas12a, optionally wherein the Cas12a comprises one or more mutations as described herein. In some embodiments, a Cas12b (C2c1) can include, but is not limited to, BhCas12b, optionally wherein the Cas12b comprises one or more mutations as described herein.

[0181] In some embodiments, a Type V CRISPR-Cas effector protein can include, but is not limited to, a Type V CRISPR-Cas effector protein from Acidaminococcus sp. (AsCas12a), from Lachnospiraceae bacterium (e.g., LbCas12a) or from Butyrivibrio hungatei (BhCas12b) or a modified Type V CRISPR-Cas effector protein thereof. In some embodiments, a Type V CRISPR-Cas effector protein from Acidaminococcus sp. may comprise a sequence having at least 80% identity to SEQ ID NO:2. In some embodiments, a Type V CRISPR-Cas effector protein from Lachnospiraceae bacterium may comprise an amino acid sequence having at least 80% identity to any one of SEQ ID NO:1, SEQ ID NO:7, SEQ ID NO:8, or SEQ ID NO:9. In some embodiments, a Type V CRISPR-Cas effector protein from Butyrivibrio hungatei may comprise a sequence having at least 80% identity to the amino acid sequence of SEQ ID NO:151. In some embodiments, a modified Type V CRISPR-Cas effector protein from Acidaminococcus sp. may comprise an amino acid sequence having at least 80% identity to any one of the SEQ ID NO:18, SEQ ID NO:19, SEQ ID NO:20, SEQ ID NO:149, or SEQ ID NO:150. In some embodiments, a modified Type V CRISPR-Cas effector protein from Lachnospiraceae bacterium may comprise a sequence having at least 80% identity to SEQ ID NO:148.

[0182] In some embodiments, a Type II CRISPR-Cas effector protein can include, but is not limited to, a Cas9 effector protein, optionally wherein the Cas9 effector protein may be from Streptococcus, optionally from Streptococcus pyogenes. In some embodiments, a Cas9 effector protein may be a modified Cas9 effector protein. In some embodiments, a Cas9 effector protein can comprise a polypeptide sequence having at least 80% identity to any one of SEQ ID NO:106 or SEQ ID NO:107. In some embodiments, a Cas9 effector protein can be encoded by a polynucleotide sequence having at least 80% identity to any one of SEQ ID NOs:108-122.

[0183] In some embodiments, a Type V CRISPR-Cas system may comprise an effector protein that utilizes a Type V CRISPR nucleic acid only. In some embodiments, a Type V CRISPR-Cas system may comprise an effector protein that, similar to Type II CRISPR-Cas systems, utilize both a CRISPR nucleic acid and a trans-activating CRISPR (tracr) nucleic acid. Thus, in some embodiments, a Type V CRISPR-Cas effector protein useful with the present invention may function with a corresponding CRISPR nucleic acid only (e.g., Cas12a, Cas12a, Cas12i, Cas12h, Cas14b, Cas14c, C2c10, C2c9, C2c8, C2c4). In some embodiments, a Type V CRISPR-Cas effector protein useful with the present invention may function with a corresponding CRISPR nucleic acid and tracr nucleic acid (e.g., Cas12b, Cas12c, Cas12e, Cas12g, Cas14a).

[0184] A CRISPR nucleic acid useful with this invention may comprise at least one repeat sequence that is capable of interacting with a corresponding Type V CRISPR-Cas effector protein, and at least one spacer sequence, wherein the at least one spacer sequence is capable of binding a target nucleic acid (e.g., a first strand or a second strand of the target nucleic acid). In some embodiments, a repeat sequence of a CRISPR nucleic acid may be located 5′ to the spacer sequence. In some embodiments, CRISPR nucleic acid may comprise more than one repeat sequence, wherein the repeat sequence is linked to both the 5′ end and the 3′ end of the spacer. In some embodiments, a CRISPR nucleic acid useful with this invention may comprise two or more repeat and one or more spacer sequences, wherein each spacer sequence is linked at the 5′ end and the 3′ end with a repeat sequence.

[0185] A tracr nucleic acid useful with this invention may comprises a first portion that is substantially complementary to and hybridizes to the repeat sequence of a corresponding CRISPR nucleic acid and a second portion that interacts with a corresponding Type II or a Type V CRISPR-Cas effector protein.

[0186] In some embodiments, a Type V CRISPR-Cas effector protein useful for this invention may function as a double stranded DNA nuclease. In some embodiments, a Type V CRISPR-Cas effector protein may function as a single stranded DNA nickase, optionally wherein the first strand is nicked. In some embodiments, a Type V CRISPR-Cas effector protein may function as a single stranded DNA nickase, optionally wherein the second strand is nicked. In some embodiments, the Type V CRISPR-Cas effector protein may be a Cas12a effector protein that functions as a nickase, optionally wherein the first strand (target strand) is nicked. In some embodiments, the Type V CRISPR-Cas effector protein may be a Cas12a effector protein that functions as a nickase, optionally wherein the second strand is nicked. In some embodiments, the Type V CRISPR-Cas effector protein may be a Cas12a effector protein that functions as a nickase through the use of crRNAs that contain strategic mismatches. Thus, for example, a crRNA may comprise a spacer having one to about four mismatches (e.g., 1, 2, 3, or 4 mismatches) (e.g., 80-96% complementary).

[0187] In some embodiments, a Cas12a effector protein may be a Cas nickase having a mutation of the arginine in the LQMRNS motif. A mutation of the arginine in this motif may be to any amino acid, thereby providing a Cas12a nickase. In some embodiments, the mutation may be to an alanine. In some embodiments, the mutation may be to an alanine, asparagine, aspartic acid, cysteine, glutamic acid, glutamine, glycine, histidine, isoleucine, leucine, lysine, methionine, phenylalanine, proline, serine, threonine, tryptophan, tyrosine, or valine. In some embodiments, the mutation may be a mutation to an alanine. In some embodiments, the mutation does not include a mutation to a lysine or a histidine. In some embodiments, a Cas12a effector protein may be an LbCas12a nickase comprising an R1138, optionally a R1138A mutation (see reference nucleotide sequence SEQ ID NO:9), an R1137 mutation, optionally a R1137A mutation (see reference nucleotide sequence SEQ ID NO:1), or an R1124 mutation, optionally a R1124A mutation (see reference nucleotide sequence SEQ ID NO:7). In some embodiments, a Cas12a effector protein may be an AsCas12a nickase comprising an R1226 mutation, optionally an R1226A mutation (see reference nucleotide sequence SEQ ID NO:2). In some embodiments, a Cas12a effector protein may be a FnCas12a nickase comprising an R1218 mutation, optionally an R1218A mutation (see reference nucleotide sequence SEQ ID NO:6. In some embodiments, a Cas12a effector protein may be a PdCas12a nickase comprising an R1241 mutation, optionally an R1241A mutation (see reference nucleotide sequence SEQ ID NO:14.

[0188] In some embodiments, a Type V CRISPR-Cas effector protein useful with this invention may comprise reduced single stranded DNA cleavage activity (ss DNAse activity) (e.g., the Type V CRISPR-Cas effector protein may be modified (mutated) to reduce ss DNAse activity (e.g., about 10, 15, 20, 25, 30, 35, 40, 45, 50, 55, 60, 65, 70, 75, 80, 85, 90, 95, 96, 97, 98, 99, or 100% less ss DNAse activity than a wild-type or non-modified Type V CRISPR-Cas effector protein).

[0189] In some embodiments, a Type V CRISPR-Cas effector protein useful with this invention may comprise reduced self-processing RNAse activity (e.g., the Type V CRISPR-Cas effector protein may be modified (mutated) to reduce self-processing RNAse activity (e.g., about 10, 15, 20, 25, 30, 35, 40, 45, 50, 55, 60, 65, 70, 75, 80, 85, 90, 95, 96, 97, 98, 99, or 100% less self-processing RNAse activity than a wild-type or non-modified Type V CRISPR-Cas effector protein). In some embodiments, a mutation to reduce self-processing RNAse activity may be a mutation of a histidine at residue position 759 with reference to nucleotide position numbering of SEQ ID NO:1 or SEQ ID NO:9, optionally a mutation of a histidine to alanine (H759A). An example Type V CRISPR-Cas effector protein having reduced single stranded DNA cleavage activity can include, but is not limited to, LbCas12a (H759A) (SEQ ID NO:148). In some embodiments, a Cas12a CRISPR-Cas effector protein having a H759A mutation useful with the invention may comprise a sequence having at least 80% sequence identity to the amino acid sequence of SEQ ID NO:148. In some embodiments, a Cas12a CRISPR-Cas effector protein having a H759A mutation may be a LbCas12a CRISPR-Cas effector protein, optionally wherein the LbCas12a CRISPR-Cas effector protein comprises at least 90% sequence identity to the amino acid sequence of SEQ ID NO:148.

[0190] In some embodiments, a Type V CRISPR-Cas effector protein or domain useful with the invention may comprise a mutation in its nuclease active site (e.g., RuvC of a dType V CRISPR-Cas effector protein or domain, e.g., RuvC site of a Cas12a nuclease domain). A CRISPR-Cas nuclease having a mutation in its nuclease active site, and therefore, no longer comprising nuclease activity, is commonly referred to as “deactivated” or “dead,” e.g., dCas, dCas12a. In some embodiments, a CRISPR-Cas nuclease domain or polypeptide having a mutation in its nuclease active site may have impaired activity or reduced activity as compared to the same CRISPR-Cas nuclease without the mutation. In some embodiments, deactivated Type V CRISPR-Cas effector protein may function as a nickase (a first strand nickase and/or a second strand nickase).

[0191] In some embodiments, a Type V CRISPR-Cas effector protein or domain useful with the invention may comprise a modification of one or more amino acid residues that reduce(s) the DNA binding affinity of the Type V CRISPR-Cas effector protein. In some embodiments, the modification may be an amino acid substitution. In some embodiments, positively charged residues that interact with DNA backbone may be mutated, optionally wherein the positively charged residues that interact with DNA backbone may be mutated to an alanine (e.g., substituted with an alanine). Substitution of a positively charged residue for an alanine in a Cas12a effector protein can include, but is not limited to, the amino acid substitution of K167A, K272A, and/or K349A with reference to the amino acid position numbering of SEQ ID NO:1 or SEQ ID NO:148. In some embodiments, the Type V CRISPR-Cas effector protein is a Cas12a CRISPR-Cas effector protein comprising an amino acid substitution of K167A, K272A, K349A, K167A+K272A, K167A+K349A, K272A+K349A, or K167A+K272A+K349A with reference to the amino acid position numbering of SEQ ID NO:148, optionally wherein the Type V CRISPR-Cas effector protein is an LbCas12a.

[0192] In some embodiments, a Type V CRISPR-Cas effector protein may be a Type V CRISPR-Cas fusion protein, wherein the Type V CRISPR-Cas fusion protein comprises a Type V CRISPR-Cas effector protein domain fused to a reverse transcriptase. In some embodiments, the reverse transcriptase may be fused to the C-terminus of the Type V CRISPR-Cas effector polypeptide. In some embodiments, the reverse transcriptase may be fused to the N-terminus of the Type V CRISPR-Cas effector polypeptide.

[0193] In some embodiments, a Type V CRISPR-Cas effector protein may be a Type V CRISPR-Cas fusion protein, wherein the Type V CRISPR-Cas fusion protein comprises a Type V CRISPR-Cas effector protein domain fused to a nicking enzyme (e.g., Fokl, BFi1, e.g., an engineered Fokl or BFiI), optionally wherein the Type V CRISPR-Cas effector protein domain may be a deactivated Type V CRISPR-Cas domain fused to the nicking enzyme.

[0194] In some embodiments, a Type II CRISPR-Cas effector protein may be a Type II CRISPR-Cas fusion protein, wherein the Type II CRISPR-Cas fusion protein comprises a Type II CRISPR-Cas effector protein domain fused to a reverse transcriptase. In some embodiments, the reverse transcriptase may be fused to the C-terminus of the Type II CRISPR-Cas effector polypeptide. In some embodiments, the reverse transcriptase may be fused to the N-terminus of the Type II CRISPR-Cas effector polypeptide. In some embodiments, a Type II CRISPR-Cas effector protein may be a Type II CRISPR-Cas fusion protein, wherein the Type II CRISPR-Cas fusion protein comprises a Type II CRISPR-Cas effector protein domain fused to a nicking enzyme (e.g., Fokl, BFi1, e.g., an engineered Fokl or BFiI), optionally wherein the Type II CRISPR-Cas effector protein domain may be a deactivated Type II CRISPR-Cas domain fused to the nicking enzyme.

[0195] In some embodiments, a reverse transcriptase useful with this invention may be a wild type reverse transcriptase. In some embodiments, a reverse transcriptase useful with this invention may be a synthetic reverse transcriptase, see, e.g., Heller et al. Nucleic Acids Research, 47(7) 3619-3630 (2019)). Example reverse transcriptase polypeptides include, but are not limited to, those having substantial identity (e.g., at least about 70%, 71%, 72%, 73%, 74%, 75%, 76%, 77%, 78%, 79%, 80%, 81%, 82%, 83%, 84%, 85%, 86%, 87%, 88%, 89%, 90%, 91%, 92%, 93%, 94%, 95%, 96%, 97%, 98%, 99%, 99.5% or 100% identity) to the amino acid sequence of SEQ ID NO:53 or SEQ ID NO:172.

[0196] In some embodiments, the activity of a reverse transcriptase may be modified for (Type V or Type II) gene editing activity to provide optimal activity in association with a Type V or Type II CRISPR-Cas effector polypeptide (e.g., an increase in activity when associated with a Type V CRISPR-Cas effector polypeptide by about 5, 10, 15, 20, 25, 30, 345, 40, 45, 50, 55, 60, 65, 70, 75, 80, 85, 90, 95, 96, 97, 98, 99, or 100% as compared to the reference reverse transcriptase that has not been modified). Such mutations include those that affect or improve RT initiation, processivity, enzyme kinetics, temperature sensitivity, and/or error rate.

[0197] In some embodiments, a reverse transcriptase useful with this invention may be modified to improve the transcription function of the reverse transcriptase. The transcription function of a reverse transcriptase may be improved by improving the processivity of the reverse transcriptase, e.g., increase the ability of the reverse transcriptase to polymerize more DNA bases during a single binding event to the template (e.g., before it falls off the template) (e.g., increase processivity by about 5, 10, 15, 20, 25, 30, 345, 40, 45, 50, 55, 60, 65, 70, 75, 80, 85, 90, 95, 96, 97, 98, 99, or 100% as compared to the reference reverse transcriptase that has not been modified).

[0198] In some embodiments, transcription function of a reverse transcriptase may be improved by increasing the template affinity of the reverse transcriptase (e.g., increase template affinity by about 5, 10, 15, 20, 25, 30, 345, 40, 45, 50, 55, 60, 65, 70, 75, 80, 85, 90, 95, 96, 97, 98, 99, or 100% as compared to the reference reverse transcriptase that has not been modified).

[0199] In some embodiments, transcription function of a reverse transcriptase may be improved by improving the thermostability of the reverse transcriptase for improved performance at a desired temperature (e.g., increase thermostability by about 5, 10, 15, 20, 25, 30, 345, 40, 45, 50, 55, 60, 65, 70, 75, 80, 85, 90, 95, 96, 97, 98, 99, or 100% as compared to the reference reverse transcriptase that has not been modified). In some embodiments, the improved thermostability is at a temperature of about 20° C. to 42° C. (e.g., about 20, 21, 22, 23, 24, 25, 26, 27, 28, 29, 30, 31, 32, 33, 34, 35, 36, 37, 38, 39, 40, 41, or 42° C., and any value or range therein). In some embodiments, a reverse transcriptase having improved thermostability may include, but is not limited to, M-MuLV trimutant D200N+L603W+T330P or M-MuLV pentamutant (5M) D200N+L603W+T330P+T306K+W313F with reference to amino acid position numbering of SEQ ID NO:172 (e.g., SEQ ID NO:53). See, e.g., Baranauskas et al. (Protein Eng. Des. Sel. 25, 657-668 (2012)); Anzalone et al. (Nature 576:149-157 (2019)). Additional amino acid modifications in a reverse transcriptase can include the amino acid substitutions of L139P, D200N, W388R, E607K, T306K, W313F, F155Y, H638G, Q221R, V223M and/or D524N with reference to the amino acid position numbering of SEQ ID NO:172.

[0200] In some embodiments, a reverse transcriptase useful with this invention can include, but is not limited to, combinations of amino acid substitutions of (1) L139P, D200N, W388R, and E607K, (2) L139P, D200N, T306K, W313F, W388R, and E607K, (3) 5M (T355A/Q357M/K358R/A359G/S360A), F155Y, and H638G, (4) 5M (T355A/Q357M/K358R/A359G/S360A), Q221R, and V223M; or (5) 5M T355A/Q357M/K358R/A359G/S360A) and D524N with reference to the amino acid position numbering of SEQ ID NO:172.

[0201] In some embodiments of the invention, a reverse transcriptase may be fused to one or more single stranded RNA binding domains (RBDs). RBDs useful with the invention may include, but are not limited to, SEQ ID NOS:37-52 (SEQ ID NO:37, SEQ ID NO:38, SEQ ID NO:39, SEQ ID NO:40, SEQ ID NO:41, SEQ ID NO:42, SEQ ID NO:43, SEQ ID NO:44, SEQ ID NO:45, SEQ ID NO:46, SEQ ID NO:47, SEQ ID NO:48, SEQ ID NO:49, SEQ ID NO:50, SEQ ID NO:51, and/or SEQ ID NO:52), thereby improving the thermostability, processivity and template affinity of the reverse transcriptase.

[0202] The polypeptides/proteins/domains of this invention (e.g., a CRISPR-Cas effector protein e.g., a Type II or Type V CRISPR-Cas effector protein), a reverse transcriptase, a 5′ flap endonuclease, and/or a 5′-3′ exonuclease) may be encoded by one or more polynucleotides, optionally operably linked to one or more promoters and/or other regulatory sequences (e.g., terminator, operon, and/or enhancer and the like). In some embodiments, the polynucleotides of this invention may be comprised in one or more expression cassettes and/or vectors. In some embodiments, the at least one regulatory sequence may be, for example, a promoter, an operon, a terminator, or an enhancer. In some embodiments, the at least one regulatory sequence may be a promoter. In some embodiments, the regulatory sequence may be an intron. In some embodiments, the at least one regulatory sequence may be, for example, a promoter operably associated with an intron or a promoter region comprising an intron. In some embodiments, the at least one regulatory sequence may be, for example a ubiquitin promoter and its associated intron (e.g., Medicago truncatula and/or Zea mays and their associated introns) (e.g., ZmUbi1 comprising an intron; MtUb2 comprising an intron, e.g., SEQ ID NOs:21 or 22.

[0203] In some embodiments, the present invention provides a polynucleotide encoding a Type II CRISPR-Cas effector protein or domain or a Type V CRISPR-Cas effector protein or domain, a polynucleotide encoding a CRISPR-Cas effector protein or domain, a polynucleotide encoding a reverse transcriptase polypeptide or domain, a polynucleotide encoding a 5′-3′ exonuclease polypeptide or domain and/or a polynucleotide encoding a flap endonuclease polypeptide or domain operably associated with one or more promoter regions that comprise or are associated with an intron, optionally wherein the promoter region may be a ubiquitin promoter and intron (e.g., a Medicago or a maize ubiquitin promoter and intron, e.g., SEQ ID NOs:21 or 22.

[0204] In some embodiments, a polynucleotide encoding a Type II or Type V CRISPR-Cas effector protein and/or a polynucleotide encoding a reverse transcriptase may be comprised in the same or separate expression cassettes, optionally when the polynucleotide encoding the Type II or Type V CRISPR-Cas effector protein and the polynucleotide encoding the reverse transcriptase are comprised in the same expression cassette, the polynucleotide encoding the Type II or Type V CRISPR-Cas effector protein and the polynucleotide encoding the reverse transcriptase may be operably linked to a single promoter or to two or more separate promoters in any combination. In some embodiments, a polynucleotide encoding a CRISPR-Cas effector protein may be comprised in an expression cassette, wherein the polynucleotide encoding the CRISPR-Cas effector protein may be operably linked to a promoter.

[0205] In some embodiments, an extended guide nucleic acid and/or guide nucleic acid may be comprised in an expression cassette, optionally wherein the expression cassette is comprised in a vector. In some embodiments, an expression cassette and/or vector comprising the extended guide nucleic acid may be the same or a different expression cassette and/or vector from that comprising the polynucleotide encoding the Type II or Type V CRISPR-Cas effector protein and/or the polynucleotide encoding the reverse transcriptase. In some embodiments, an expression cassette and/or vector comprising the guide nucleic acid may be the same or a different expression cassette and/or vector from that comprising the polynucleotide encoding the CRISPR-Cas effector protein.

[0206] In some embodiments, a polynucleotide encoding a 5′ flap endonuclease and/or a polynucleotide encoding a 5′-3′ exonuclease may be comprised in one or more expression cassettes, which may be the same or different expression cassettes. In some embodiments, an expression cassette comprising a polynucleotide encoding a 5′ flap endonuclease and/or a polynucleotide encoding a 5′-3′ exonuclease may be the same or different expression cassette from that comprising a polynucleotide encoding a Type II or Type V CRISPR-Cas effector protein, a polynucleotide encoding a Type II or Type V CRISPR-Cas effector protein and/or a polynucleotide encoding a reverse transcriptase.

[0207] In some embodiments of the invention, polynucleotides encoding CRISPR-Cas effector proteins (e.g., a Type II CRISPR-Cas effector protein, a Type V CRISPR-Cas effector protein), reverse transcriptase, flap endonucleases, 5′-3′ exonucleases, and fusion proteins comprising the same and nucleic acid constructs, expression cassettes and/or vectors comprising the polynucleotides may be codon optimized for expression in an organism (e.g., an animal (e.g., a mammal, an insect, a fish, and the like), a plant (e.g., a dicot plant, a monocot plant), a bacterium, an archaeon, a virus, and the like). In some embodiments, the polynucleotides, expression cassettes, and/or vectors may be codon optimized for expression in a plant, optionally a dicot plant or a monocot plant. Exemplary mammals for which this invention may be useful include, but are not limited to, primates (human and non-human (e.g., a chimpanzee, baboon, monkey, gorilla, etc.)), cats, dogs, ferrets, gerbils, hamsters, cows, pigs, horses, goats, donkeys, or sheep. In some embodiments, the polynucleotides, expression cassettes, and/or vectors may be codon optimized for expression in a fungus, including, but not limited to, a Zygomycota, Ascomycota, Basidiomycota, and Deuteromycota (fungi imperfecti), optionally wherein the fungus may be an ascomycete, optionally a yeast (e.g., Saccharomyces cerevisiae).

[0208] In some embodiments, the polynucleotides, nucleic acid constructs, expression cassettes or vectors of the invention that are optimized for expression in an organism may be about 70% to 100% identical (e.g., about 70%, 71%, 72%, 73%, 74%, 75%, 76%, 77%, 78%, 79%, 80%, 81%, 82%, 83%, 84%, 85%, 86%, 87%, 88%, 89%, 90%, 91%, 92%, 93%, 94%, 95%, 96%, 97%, 98%, 99%, 99.5% or 100%) to the nucleic acid constructs, expression cassettes or vectors encoding the same but which have not been codon optimized for expression in a plant.

[0209] In some embodiments, polynucleotides, nucleic acid constructs, expression cassettes and vectors may be provided for carrying out the methods of the invention. Thus, in some embodiments an expression cassette is provided that is codon optimized for expression in an organism, comprising 5′ to 3′ (a) polynucleotide encoding a promoter sequence, (b) a polynucleotide encoding a Type V CRISPR-Cas nuclease (e.g., Cpf1 (Cas12a), dCas12a and the like) or a Type II CRISPR-Cas nuclease (e.g., Cas9, dCas9 and the like) that is codon-optimized for expression in the organism; (c) a linker sequence; and (d) a polynucleotide encoding a reverse transcriptase that is codon-optimized for expression in the organism. In some embodiments, the organism is an animal, a plant, a fungus, an archaeon, or a bacterium. In some embodiments, the organism is a plant and the polynucleotide encoding a Type V CRISPR-Cas nuclease is codon optimized for expression in a plant, and the promoter sequence is a plant specific promoter sequence (e.g., ZmUbi1, MtUb2, RNA polymerase II (Pol II)).

[0210] In some embodiments, polynucleotides, nucleic acid constructs, expression cassettes and vectors may be provided for carrying out the methods of the invention. Thus, in some embodiments, an expression cassette is provided that is codon optimized for expression in a plant, comprising 5′ to 3′ (a) polynucleotide encoding a plant specific promoter sequence (e.g. ZmUbi1, MtUb2, RNA polymerase II (Pol II)), (b) a plant codon-optimized polynucleotide encoding a Type II or Type V CRISPR-Cas effector protein (e.g., Cpf1 (Cas12a), dCas12a and the like), (c) a linker sequence; and (d) a plant codon-optimized polynucleotide encoding a reverse transcriptase.

[0211] In some embodiments, polypeptides of the invention may be fusion proteins comprising one or more polypeptides linked to one another via a linker. In some embodiments, the linker may be an amino acid or peptide linker. In some embodiments, a peptide linker may be about 2 to about 100 amino acids (residues) in length, as described herein. In some embodiments, a peptide linker may be, for example, a GS linker.

[0212] In some embodiments, the invention provides an expression cassette that is codon optimized for expression in a plant, comprising: (a) a polynucleotide encoding a plant specific promoter sequence (e.g. ZmUbi1, MtUb2), and (b) an extended guide nucleic acid sequence, wherein the extended guide nucleic acid comprises an extended portion comprising at its 3′ end a primer binding site and an edit to be incorporated into the target nucleic acid (e.g., edit in the reverse transcriptase template) (e.g., 5′-3′-crRNA-RTT-PBS) (e.g., tag nucleic acid; e.g., tagRNA), optionally wherein the extended guide nucleic acid is comprised in an expression cassette, optionally wherein the extended guide nucleic acid is operably linked to a Pol II promoter. In some embodiments, when the extended portion of the guide nucleic acid is attached to a CRISPR RNA at the 5′ end of the crRNA, the extended portion comprises at its 5′ end a primer binding site and an edit to be incorporated into the target nucleic acid (e.g., reverse transcriptase template) at the 3′ end (5′-3′-PBS-RTT-crRNA).

[0213] In some embodiments, an expression cassette of the invention may be codon optimized for expression in a dicot plant or in a monocot plant. In some embodiments, the expression cassettes of the invention may be used in a method of modifying a target nucleic acid in a plant or plant cell, the method comprising introducing one or more expression cassettes of the invention into a plant or plant cell, thereby modifying the target nucleic acid in the plant or plant cell to produce a plant or plant cell comprising the modified target nucleic acid. In some embodiments, the method may further comprise regenerating the plant cell comprising the modified target nucleic acid to produce a plant comprising the modified target nucleic acid.

[0214] In some embodiments, an expression cassette of the invention may be codon optimized for expression in an animal, e.g., a mammal. In some embodiments, the expression cassettes of the invention may be used in a method of modifying a target nucleic acid in an animal cell (e.g., a mammalian cell), the method comprising introducing one or more expression cassettes of the invention into a animal cell, thereby modifying the target nucleic acid in the animal cell to produce a animal cell comprising the modified target nucleic acid.

[0215] A CRISPR Cas9 polypeptide or CRISPR Cas9 domain (e.g., a Type II CRISPR Case effector protein) useful with this invention may be any known or later identified Cas9 nuclease. In some embodiments, a CRISPR Cas9 polypeptide can be a Cas9 polypeptide from, for example, Streptococcus spp. (e.g., S. pyogenes, S. thermophilus) (e.g., spCas9), Lactobacillus spp., Bifidobacterium spp., Kandleria spp., Leuconostoc spp., Oenococcus spp., Pediococcus spp., Weissella spp., and/or Olsenella spp.

[0216] Cas12a is a Type V Clustered Regularly Interspaced Short Palindromic Repeats (CRISPR)-Cas effector protein or domain. Cas12a differs in several respects from the more well-known Type II CRISPR Cas9 effector protein. For example, Cas9 recognizes a G-rich protospacer-adjacent motif (PAM) that is 3′ to its guide RNA (gRNA, sgRNA) binding site (protospacer, target nucleic acid, target DNA) (3′-NGG), while Cas12a recognizes a T-rich PAM that is located 5′ to the target nucleic acid (5′-TTN, 5′-TTTN. In fact, the orientations in which Cas9 and Cas12a bind their guide RNAs are very nearly reversed in relation to their N and C termini. Furthermore, Cas12a effector proteins use a single guide RNA (gRNA, CRISPR array, crRNA) rather than the dual guide RNA (sgRNA (e.g., crRNA and tracrRNA)) found in natural Cas9 systems, and Cas12a processes its own gRNAs. Additionally, nuclease activity of a Cas12a produces staggered DNA double stranded breaks instead of blunt ends produced by nuclease activity of a Cas9, and Cas12a relies on a single RuvC domain to cleave both DNA strands, whereas Cas9 utilizes an HNH domain and a RuvC domain for cleavage.

[0217] A CRISPR Cas12a effector protein or domain useful with this invention may be any known or later identified Cas12a nuclease (previously known as Cpf1) (see, e.g., U.S. Pat. No. 9,790,490, which is incorporated by reference for its disclosures of Cpf1 (Cas12a) sequences). The term “Cas12a”, “Cas12a polypeptide” or “Cas12a domain” refers to an RNA-guided effector protein comprising a Cas12a, or a fragment thereof, which comprises the guide nucleic acid binding domain of Cas12a and/or an active, inactive, or partially active DNA cleavage domain of Cas12a. In some embodiments, a Cas12a useful with the invention may comprise a mutation in the nuclease active site (e.g., RuvC site of the Cas12a domain). A Cas12a effector protein or domain having a mutation in its nuclease active site, and therefore, no longer comprising nuclease activity, is commonly referred to as dead or deactivated Cas12a (e.g., dCas12a).

[0218] In some embodiments, a Cas12a effector polypeptide that may be optimized or otherwise modified (e.g., deactivate) according to the present invention can include, but is not limited to, the amino acid sequence of any one of SEQ ID NOs:1-20 (e.g., SEQ ID NOs: 1, 2, 3, 4, 5, 6, 7, 8, 9, 10, 11, 12, 13, 14, 15, 16, 17, 18, 19 or 20), or SEQ ID NOs:148, 149, 150 or 151, or a polynucleotide encoding the same.

[0219] In some embodiments, a Cas9 effector polypeptide that may be optimized or otherwise modified (e.g., deactivate) according to the present invention can include, but is not limited to, the amino acid sequence of any one of SEQ ID NO:106 or SEQ ID NO:107, or a polynucleotide encoding the same. In some embodiments, a Cas9 effector polypeptide that may be optimized or otherwise modified (e.g., deactivate) according to the present invention can comprise an amino acid sequence encoded by any one of the nucleic acid sequences of SEQ ID NOs:108-122.

[0220] A “guide nucleic acid,” “guide RNA,” “gRNA,” “CRISPR RNA/DNA” “crRNA” or “crDNA” as used herein means a nucleic acid that comprises at least one spacer sequence, which is complementary to (and hybridizes to) a target DNA (e.g., protospacer), and at least one repeat sequence that corresponds to a particular CRISPR-Cas effector protein (e.g., for a Type V CRISPR Cas effector protein, the repeat or a fragment or portion thereof is from a Type V Cas12a CRISPR-Cas system; for a Type II CRISPR Cas effector protein, the repeat or a fragment or portion thereof is from a Type II Cas9 CRISPR-Cas system). Thus, a repeat of a CRISPR-Cas system useful with the present invention may correspond to the CRISPR-Cas effector protein of, for example, Cas9, C2c3, Cas12a (also referred to as Cpf1), Cas12b, Cas12c, Cas12d, Cas12e, Cas13a, Cas13b, Cas13c, Cas13d, Cas1, Cas1B, Cas2, Cas3, Cas3′, Cas3″, Cas4, Cas5, Cas6, Cas7, Cas8, Cas9 (also known as Csn1 and Csx12), Cas10, Csy1, Csy2, Csy3, Cse1, Cse2, Csc1, Csc2, Csa5, Csn2, Csm2, Csm3, Csm4, Csm5, Csm6, Cmr1, Cmr3, Cmr4, Cmr5, Cmr6, Csb1, Csb2, Csb3, Csx17, Csx14, Csx10, Csx16, CsaX, Csx3, Csx1, Csx15, Csf1, Csf2, Csf3, Csf4 (dinG), and/or Csf5, or a fragment thereof, wherein the repeat sequence may be linked to the 5′ end and/or the 3′ end of the spacer sequence. The design of a guide nucleic acid of this invention may be based on a Type I, Type II, Type III, Type IV, or Type V CRISPR-Cas system. In some embodiments, the design of a guide nucleic acid of this invention is based on a Type V CRISPR-Cas system. In some embodiments, the design of a guide nucleic acid of this invention is based on a Type II CRISPR-Cas system.

[0221] In some embodiments, a guide nucleic acid (e.g., crRNA, e.g., Cas12a crRNA, Cas12b crRNA, Cas9 crRNA, and the like) may comprise, from 5′ to 3′, a repeat sequence (full length or portion thereof (“handle”); e.g., pseudoknot-like structure) and a spacer sequence. In some embodiments, an extended guide nucleic acid (e.g., tagRNA, e.g., Cas12a extended guide nucleic acid, Cas12b extended guide nucleic acid, Cas9 extended guide nucleic acid, and the like) may comprise, from 5′ to 3′, a repeat sequence (full length or portion thereof (“handle”); e.g., pseudoknot-like structure) a spacer sequence, plus a 3′ or 5′ extended portion comprising a primer binding site and a reverse transcriptase template (RT template) (RTT) (e.g., a tagRNA extension).

[0222] In some embodiments, a guide nucleic acid may comprise more than one repeat sequence-spacer sequence (e.g., 2, 3, 4, 5, 6, 7, 8, 9, 10, or more repeat-spacer sequences) (e.g., repeat-spacer-repeat, e.g., repeat-spacer-repeat-spacer-repeat-spacer-repeat-spacer-repeat-spacer, and the like). The guide nucleic acids of this invention are synthetic, human-made and not found in nature. A guide nucleic acid may be quite long and may be used as an aptamer (like in the MS2 recruitment strategy) or other RNA structures hanging off the spacer. In some embodiments, as described herein, a guide nucleic acid may include a template for editing and a primer binding site. In some embodiments, a guide nucleic acid may include a region or sequence on its 5′ end or 3′ end that is complementary to an editing template (a reverse transcriptase template), thereby recruiting the editing template to the target nucleic acid (i.e., an extended guide nucleic acid). In some embodiments, a guide nucleic acid may include a region or sequence on its 5′ end or 3′ end that is complementary to a primer on the target nucleic acid (a primer binding site), thereby recruiting the primer binding site to the target nucleic acid (i.e., an extended guide nucleic acid).

[0223] A “repeat sequence” as used herein, refers to, for example, any repeat sequence of a wild-type CRISPR Cas locus (e.g., a Cas9 locus, a Cas12a locus, a C2c1 locus, etc.) or a repeat sequence of a synthetic crRNA that is functional with the CRISPR-Cas nuclease encoded by the nucleic acid constructs of the invention. A repeat sequence useful with this invention can be any known or later identified repeat sequence of a CRISPR-Cas locus (e.g., Type I, Type II, Type III, Type IV, Type V or Type VI) or it can be a synthetic repeat designed to function in a Type I, II, III, IV, V or VI CRISPR-Cas system. Thus, in some embodiments, a repeat sequence can be identical to or substantially identical to a repeat sequence from wild-type Type I CRISPR-Cas loci, Type II, CRISPR-Cas loci, Type III, CRISPR-Cas loci, Type IV CRISPR-Cas loci, Type V CRISPR-Cas loci and/or Type VI CRISPR-Cas loci. In some embodiments, a repeat sequence useful with this invention can be any known or later identified repeat sequence of a Type V CRISPR-Cas locus or it can be a synthetic repeat designed to function in a Type V CRISPR-Cas system. A repeat sequence may comprise a hairpin structure and/or a stem loop structure. In some embodiments, a repeat sequence may form a pseudoknot-like structure at its 5′ end (i.e., “handle”). Thus, in some embodiments, a repeat sequence can be identical to or substantially identical to a repeat sequence from wild type Type V CRISPR-Cas loci or wild type Type II CRISPR-Cas loci. A repeat sequence from a wild-type CRISPR-Cas locus may be determined through established algorithms, such as using the CRISPRfinder offered through CRISPRdb (see, Grissa et al. Nucleic Acids Res. 35 (Web Server issue):W52-7 or BMC Informatics 8:172 (2007) (doi:10.1186/1471-2105-8-172)). In some embodiments, a repeat sequence or portion thereof is linked at its 3′ end to the 5′ end of a spacer sequence, thereby forming a repeat-spacer sequence (e.g., guide RNA, crRNA).

[0224] In some embodiments, a repeat sequence comprises, consists essentially of, or consists of at least 10 nucleotides depending on the particular repeat and whether the guide RNA comprising the repeat is processed or unprocessed (e.g., about 10, 11, 12, 13, 14, 15, 16, 17, 18, 19, 20, 21, 22, 23, 24, 25, 26, 27, 28, 29, 30, 31, 32, 33, 34, 35, 36, 37, 38, 39, 40, 41, 42, 43, 44, 45, 46, 47, 48, 49, 50 to 100 or more nucleotides, or any range or value therein; e.g., about). In some embodiments, a repeat sequence comprises, consists essentially of, or consists of about 10 to about 20, about 10 to about 30, about 10 to about 45, about 10 to about 50, about 15 to about 30, about 15 to about 40, about 15 to about 45, about 15 to about 50, about 20 to about 30, about 20 to about 40, about 20 to about 50, about 30 to about 40, about 40 to about 80, about 50 to about 100 or more nucleotides.

[0225] A repeat sequence linked to the 5′ end of a spacer sequence can comprise a portion of a repeat sequence (e.g., 5, 6, 7, 8, 9, 10, 11, 12, 13, 14, 15, 16, 17, 18, 19, 20, 21, 22, 23, 24, 25, 26, 27, 28, 29, 30, 31, 32, 33, 34, 35 or more contiguous nucleotides of a wild type repeat sequence). In some embodiments, a portion of a repeat sequence linked to the 5′ end of a spacer sequence can be about five to about ten consecutive nucleotides in length (e.g., about 5, 6, 7, 8, 9, 10 nucleotides) and have at least 90% identity (e.g., at least about 90%, 91%, 92%, 93%, 94%, 95%, 96%, 97%, 98%, 99%, or more) to the same region (e.g., 5′ end) of a wild type CRISPR Cas repeat nucleotide sequence. In some embodiments, a portion of a repeat sequence may comprise a pseudoknot-like structure at its 5′ end (e.g., “handle”).

[0226] A “spacer sequence” as used herein is a nucleotide sequence that is complementary to a target nucleic acid (e.g., target DNA) (e.g., protospacer). The spacer sequence can be fully complementary or substantially complementary (e.g., at least about 70% complementary (e.g., about 70%, 71%, 72%, 73%, 74%, 75%, 76%, 77%, 78%, 79%, 80%, 81%, 82%, 83%, 84%, 85%, 86%, 87%, 88%, 89%, 90%, 91%, 92%, 93%, 94%, 95%, 96%, 97%, 98%, 99%, 99.5%, 99.6%, 99.7%, 99.8%, 99.9% or more)) to a target nucleic acid. Thus, in some embodiments, the spacer sequence can have one, two, three, four, or five mismatches as compared to the target nucleic acid, which mismatches can be contiguous or noncontiguous. In some embodiments, the spacer sequence can have 70% complementarity to a target nucleic acid. In some embodiments, the spacer nucleotide sequence can have 80% complementarity to a target nucleic acid. In still other embodiments, the spacer nucleotide sequence can have 85%, 90%, 91%, 92%, 93%, 94%, 95%, 96%, 97%, 98%, 99%, 99.5%, 99.6%, 99.7%, 99.8%, 99.9% or more complementarity, and the like, to the target nucleic acid (protospacer). In some embodiments, the spacer sequence is 100% complementary to the target nucleic acid. In some embodiments, a spacer sequence may have a length from about 15 nucleotides to about 30 nucleotides (e.g., 15, 16, 17, 18, 19, 20, 21, 22, 23, 24, 25, 26, 27, 28, 29, or 30 nucleotides, or any range or value therein). Thus, in some embodiments, a spacer sequence may have complete complementarity or substantial complementarity over a region of a target nucleic acid (e.g., protospacer) that is at least about 15 nucleotides to about 30 nucleotides in length. In some embodiments, the spacer is about 20 nucleotides in length. In some embodiments, the spacer is about 23 nucleotides in length.

[0227] In some embodiments, the 5′ region of a spacer sequence of a guide RNA may be identical to a target DNA, while the 3′ region of the spacer may be substantially complementary to the target DNA (e.g., Type V CRISPR-Cas), or the 3′ region of a spacer sequence of a guide RNA may be identical to a target DNA, while the 5′ region of the spacer may be substantially complementary to the target DNA (e.g., Type II CRISPR-Cas), and therefore, the overall complementarity of the spacer sequence to the target DNA may be less than 100%. Thus, for example, in a guide for a Type V CRISPR-Cas system, the first 1, 2, 3, 4, 5, 6, 7, 8, 9, 10 nucleotides in the 5′ region (i.e., seed region) of, for example, a 20-nucleotide spacer sequence may be 100% complementary to the target DNA, while the remaining nucleotides in the 3′ region of the spacer sequence are substantially complementary (e.g., at least about 70% complementary) to the target DNA. In some embodiments, the first 1 to 8 nucleotides (e.g., the first 1, 2, 3, 4, 5, 6, 7, 8, nucleotides, and any range therein) of the 5′ end of the spacer sequence may be 100% complementary to the target DNA, while the remaining nucleotides in the 3′ region of the spacer sequence are substantially complementary (e.g., at least about 50% complementary (e.g., 50%, 55%, 60%, 65%, 70%, 71%, 72%, 73%, 74%, 75%, 76%, 77%, 78%, 79%, 80%, 81%, 82%, 83%, 84%, 85%, 86%, 87%, 88%, 89%, 90%, 91%, 92%, 93%, 94%, 95%, 96%, 97%, 98%, 99%, 99.5%, 99.6%, 99.7%, 99.8%, 99.9% or more)) to the target DNA.

[0228] As a further example, in a guide for a Type II CRISPR-Cas system, the first 1, 2, 3, 4, 5, 6, 7, 8, 9, 10 nucleotides in the 3′ region (i.e., seed region) of, for example, a 20-nucleotide spacer sequence may be 100% complementary to the target DNA, while the remaining nucleotides in the 5′ region of the spacer sequence are substantially complementary (e.g., at least about 70% complementary) to the target DNA. In some embodiments, the first 1 to 10 nucleotides (e.g., the first 1, 2, 3, 4, 5, 6, 7, 8, 9, 10 nucleotides, and any range therein) of the 3′ end of the spacer sequence may be 100% complementary to the target DNA, while the remaining nucleotides in the 5′ region of the spacer sequence are substantially complementary (e.g., at least about 50% complementary (e.g., at least about 50%, 55%, 60%, 65%, 70%, 71%, 72%, 73%, 74%, 75%, 76%, 77%, 78%, 79%, 80%, 81%, 82%, 83%, 84%, 85%, 86%, 87%, 88%, 89%, 90%, 91%, 92%, 93%, 94%, 95%, 96%, 97%, 98%, 99%, 99.5%, 99.6%, 99.7%, 99.8%, 99.9% or more or any range or value therein)) to the target DNA.

[0229] In some embodiments, a seed region of a spacer may be about 8 to about 10 nucleotides in length, about 5 to about 6 nucleotides in length, or about 6 nucleotides in length.

[0230] In some embodiments, an extended guide nucleic acid of this invention may be an extended guide nucleic acid, a first extended guide nucleic acid and/or a second extended guide nucleic acid. In some embodiments, an extended guide nucleic acid useful with this invention may comprise: (a) a CRISPR nucleic acid (e.g., CRISPR RNA, CRISPR DNA, crRNA, crDNA) and/or a CRISPR nucleic acid and a tracr nucleic acid; and (b) an extended portion comprising a primer binding site and a reverse transcriptase template (RT template), wherein the RT template encodes a modification to be incorporated into the target nucleic acid as described herein (e.g., encodes an edit located in any position within an RT template with the position location relative to the position of a protospacer adjacent motif (PAM) of the target nucleic acid, optionally an edit located at nucleotide position −1 to nucleotide position 19, nucleotide position 10 to nucleotide position 17, or nucleotide position 12 to nucleotide position 15). In some embodiments, a CRISPR nucleic acid may be a Type II or Type V CRISPR nucleic acid and/or a tracr nucleic acid may be any tracr corresponding to the appropriate Type II or Type V CRISPR nucleic acid. An extended guide nucleic acid may also be referred to as a targeted allele guide nucleic acid, a targeted allele guide DNA, a targeted allele guide RNA (tagRNA)). In some embodiments, a CRISPR nucleic acid useful with the invention may be a Type V CRISPR nucleic acid. In some embodiments, a tracr nucleic acid useful with the invention may be a Type V CRISPR tracr nucleic acid. In some embodiments, a CRISPR nucleic acid useful with the invention may be a Type II CRISPR nucleic acid. In some embodiments, a tracr nucleic acid useful with the invention may be a Type II CRISPR tracr nucleic acid. In some embodiments, a CRISPR nucleic acid and/or tracr nucleic acid may be from, for example, a Cas9, C2c3, Cas12a (also referred to as Cpf1), Cas12b, Cas12c, Cas12d, Cas12e, Cas13a, Cas13b, Cas13c, Cas13d, Cas1, Cas1B, Cas2, Cas3, Cas3′, Cas3″, Cas4, Cas5, Cas6, Cas7, Cas8, Cas9 (also known as Csn1 and Csx12), Cas10, Csy1, Csy2, Csy3, Cse1, Cse2, Csc1, Csc2, Csa5, Csn2, Csm2, Csm3, Csm4, Csm5, Csm6, Cmr1, Cmr3, Cmr4, Cmr5, Cmr6, Csb1, Csb2, Csb3, Csx17, Csx14, Csx10, Csx16, CsaX, Csx3, Csx1, Csx15, Csf1, Csf2, Csf3, Csf4 (dinG), and/or Csf5 system.

[0231] In some embodiments, an extended portion of the extended guide may comprise, 5′ to 3′, an RT template and a primer binding site (when the extended guide is linked to the 3′ end of the CRISPR nucleic acid). In some embodiments, an extended portion of the extended guide may comprise, 5′ to 3′, a primer binding site and an RT template (RTT) (when the extended guide is linked to the 5′ end of the CRISPR nucleic acid). In some embodiments, an RT template may be a length of about 1 nucleotide to about 100 nucleotides (e.g., about 1, 2, 3, 4, 5, 6, 7, 8, 9, 10, 11, 12, 13, 14, 15, 16, 17, 18, 19, 20, 21, 22, 23, 24, 25, 26, 27, 28, 29, 30, 31, 32, 33, 34, 35, 36, 37, 38, 39, 40, 41, 42, 43, 44, 45, 46, 47, 48, 49, 50, 51, 52, 53, 54, 55, 56, 57, 58, 59, 60, 61, 62, 63, 64, 65, 66, 67, 68, 69, 70, 71, 72, 73, 74, 75, 76, 77, 78, 79, 80, 81, 82, 83, 84, 85, 86, 87, 88, 89, 90, 91, 92, 93, 94, 95, 96, 97, 98, 99, 100 or more nucleotides, and any range or value therein), e.g., about 35 nucleotide to about 100 nucleotides, about 35 nucleotide to about 80 nucleotides, about 35 nucleotide to about 75 nucleotides, about 40 nucleotides to about 75 nucleotides, about 45 nucleotides to about 75 nucleotides, about 45 nucleotides to about 60 nucleotides in length and any range or value therein. In some embodiments, the length of an RT template may be at least 30 nucleotides, optionally about 30, 31, 32, 33, 34, 35, 36, 37, 38, 39, or 40 nucleotides in length to about to about 41, 42, 43, 44, 45, 46, 47, 48, 49, 50, 51, 52, 53, 54, 55, 56, 57, 58, 59, 60, 61, 62, 63, 64, 65, 66, 67, 68, 69, 70, 71, 72, 73, 74, 75, 76, 77, 78, 79, or 80 nucleotides in length, or any range or value therein. In some embodiments, the length of an RT template may be about 836, 40, 44, 47, 50, 52, 55, 63, 72 or 74 nucleotides. Within the length of the RTT is comprised an edit. The edit may be located anywhere within the RTT, wherein the position of the edit may be described relative to the position of a protospacer adjacent motif (PAM) of the target nucleic acid. In some embodiments, an RT template may comprise an edit located at nucleotide position −1, 1, 2, 3, 4, 5, 6, 7, 8, 9, 10, 11, 12, 13, 14, 15, 16, 27, 18, or 19. In some embodiments, an RT template may comprise an edit located at nucleotide position 4 to nucleotide position 17 (e.g., position 4, 5, 6, 7, 8, 9, 10, 11, 12, 13, 14, 15, 16, or 17) of the RT template relative to the position of a protospacer adjacent motif (PAM) of the target nucleic acid. In some embodiments, an RT template may comprise an edit located at nucleotide position 10 to nucleotide position 17 (e.g., position 10, 11, 12, 13, 14, 15, 16, or 17) of the RT template relative to the position of a protospacer adjacent motif (PAM) of the target nucleic acid. In some embodiments, an RT template may comprise an edit located at nucleotide position 12 to nucleotide position 15 (e.g., position 12, 13, 14, or 15) of the RT template relative to the position of a protospacer adjacent motif (PAM) of the target nucleic acid.

[0232] As used herein, a “primer binding site” (PBS) of an extended portion of an extended guide nucleic acid (e.g., tagRNA) refers to a sequence of consecutive nucleotides that can bind to a region or “primer” on a target nucleic acid, i.e., is complementary to the target nucleic acid primer. As an example, a CRISPR Cas effector protein (e.g., Type II or Type V, e.g., Cas 9 or Cas12a) nicks/cuts the DNA, the 3′ end of the cut DNA acts as a primer for the PBS portion of the extended guide nucleic acid. The PBS is designed to be complementary to the 3′end of a strand of the target nucleic acid and can be designed to bind either to the target strand or non-target strand. A primer binding site can be fully complementary to the primer or it may be substantially complementary (e.g., at least 70% complementary (e.g., about 70%, 71%, 72%, 73%, 74%, 75%, 76%, 77%, 78%, 79%, 80%, 81%, 82%, 83%, 84%, 85%, 86%, 87%, 88%, 89%, 90%, 91%, 92%, 93%, 94%, 95%, 96%, 97%, 98%, 99%, 99.5%, 99.6%, 99.7%, 99.8%, 99.9% or more)) to the primer on the target nucleic acid. In some embodiments, the length of a primer binding site of an extended portion may be about 1 nucleotide to about 100 nucleotides in length (e.g., about 1, 2, 3, 4, 5, 6, 7, 8, 9, 10, 11, 12, 13, 14, 15, 16, 17, 18, 19, 20, 21, 22, 23, 24, 25, 26, 27, 28, 29, 30, 31, 32, 33, 34, 35, 36, 37, 38, 39, 40, 41, 42, 43, 44, 45, 46, 47, 48, 49, 50, 51, 52, 53, 54, 55, 56, 57, 58, 59, 60, 61, 62, 63, 64, 65, 66, 67, 68, 69, 70, 71, 72, 73, 74, 75, 76, 77, 78, 79, 80, 81, 82, 83, 84, 85, 86, 87, 88, 89, 90, 91, 92, 93, 94, 95, 96, 97, 98, 99, 100 or more nucleotides, or any value or range therein), or about 4 nucleotide to about 85 nucleotides, about 10 nucleotide to about 80 nucleotides, about 20 nucleotide to about 80 nucleotides, about 25 nucleotides to about 80 nucleotides about 30 nucleotide to about 80 nucleotides, about 40 nucleotide to about 80 nucleotides, about 45 nucleotide to about 80 nucleotides, about 45 nucleotide to about 75 nucleotides or about 45 nucleotide to about 60 nucleotides, or any range or value therein. In some embodiments, the length of an PBS may be at least 30 nucleotides, optionally about 30, 31, 32, 33, 34, 35, 36, 37, 38, 39, or 40 nucleotides to about 41, 42, 43, 44, 45, 46, 47, 48, 49, 50, 51, 52, 53, 54, 55, 56, 57, 58, 59, 60, 61, 62, 63, 64, 65, 66, 67, 68, 69, 70, 71, 72, 73, 74, 75, 76, 77, 78, 79, or 80 nucleotides in length, or any range or value therein. In some embodiments, the length of a PBS may be about 8, 16, 24, 32, 40, 48, 56, 64, 72, or 80 nucleotides.

[0233] In some embodiments, an RTT may have a length of about 35 nucleotides to about 75 nucleotides and a PBS may have a length of about 30 nucleotides to about 80 nucleotides, optionally wherein the PBS may comprise a length of about 8, 16, 24, 32, 40, 48, 56, 64, 72, or 80 nucleotides and the RTT may comprise a length of about 36, 40, 44, 47, 50, 52, 55, 63, 72 or 74 nucleotides, or any combination thereof of the RTT length and/or PBS length.

[0234] In some embodiments, an extended guide nucleic (e.g., extended guide nucleic acid, first extended guide nucleic acid, second extended guide nucleic acid) may comprise a structured RNA motif, optionally wherein the structured RNA motif may be located at the 3′ end of the extended guide nucleic acid. In some embodiments, the structured RNA motif can include, but is not limited to, AsCpf1BB (SEQ ID NO:189), BoxB (SEQ ID NO:190), pseudoknot (decoy) (SEQ ID NO:95, SEQ ID NO:203), pseudoknot (tEvoPreQ1) (SEQ ID NO:191), fmpknot (SEQ ID NO:192), mpknot (SEQ ID NO:193), MS2 (SEQ ID NO:194), PP7 (SEQ ID NO:195), SLBP (SEQ ID NO:196), TAR (SEQ ID NO:197), and/or ThermoPh (SEQ ID NO:198). In some embodiments, a structured RNA motif can be a pseudoknot, optionally wherein the pseudoknot is located at the 3′ end of the extended guide nucleic acid. Pseudoknots are RNA structural motifs formed upon base pairing of a single-stranded region of RNA in the loop of a hairpin to a stretch of complementary nucleotides elsewhere in the RNA chain. In some embodiments, a pseudoknot useful with the invention may be a naturally occurring pseudoknot or a synthetic pseudoknot. The term pseudoknot, as used herein, includes, but is not limited to, hairpins, multiloops, kissing loops, coaxial stacking, triplexes, pseudoknot-like structures, a pseudoknotted hairpins and/or a decoy pseudoknotted hairpins or other RNA structural motifs. In some embodiments, the pseudoknot may be located at the 3′ end of the extended guide nucleic acid. In some embodiments, when the extended guide comprises 5′-3′ crRNA-RTT-PBS, a pseudoknot may be located 5′ of the RTT or 3′ of the PBS. In some embodiments, the pseudoknot may be located at the 3′ end of the extended guide nucleic acid. In some embodiments, when the extended guide comprises the extension (extended portion) at the 5′ end of the crRNA, a pseudoknot may be located 3′ of the RTT or 5′ of the PBS. In some embodiments, a pseudoknot useful with an extended guide can include, but is not limited to, a tEvoPreQ1 Pseudoknot comprising the nucleic acid sequence of UAAUUUCUACUAAGUGUAGAU (SEQ ID NO:158), a pseudoknot EvoPreQ1 comprising the nucleic acid sequence of TTGACGCGGTTCTATCTAGTTACGCGTTAAACCAACUAGAAA (SEQ ID NO:191) or a pseudoknot comprising the nucleic acid sequence of TAAGTCTCCATAGAATGGAGG (SEQ ID NO:95) and/or UAAGUCUCCAUAGAAUGGAGG (SEQ ID NO:203). An extended guide nucleic acid of this invention may be comprised in an expression cassette, optionally wherein the expression cassette is comprised in a vector.

[0235] In some embodiments, an extended portion of an extended guide may be fused to either the 5′ end or 3′ end of a Type II or a Type V CRISPR nucleic acid (e.g., 5′ to 3′: repeat-spacer-extended portion, or extended portion-repeat-spacer) and/or to the 5′ or 3′ end of the tracr nucleic acid. In some embodiments, when an extended portion is located 5′ of the crRNA, the Type V CRISPR-Cas effector protein is modified to reduce (or eliminate) self-processing RNAse activity. In some embodiments, a Type V CRISPR-Cas effector protein that is modified to reduce (or eliminate) self-processing RNAse activity may be utilized also when the extended portion is located 3′ of the crRNA.

[0236] In some embodiments, the extended portion of an extended guide nucleic acid may be linked to the Type II or Type V CRISPR nucleic acid and/or the Type II or Type V tracrRNA via a linker. In some embodiments, a linker may be a length of about 1 to about 100 nucleotides or more (e.g., about 1, 2, 3, 4, 5, 6, 7, 8, 9, 10, 11, 12, 13, 14, 15, 16, 17, 18, 19, 20, 21, 22, 23, 24, 25, 26, 27, 28, 29, 30, 31, 32, 33, 34, 35, 36, 37, 38, 39, 40, 41, 42, 43, 44, 45, 46, 47, 48, 49, 50, 51, 52, 53, 54, 55, 56, 57, 58, 59, 60, 61, 62, 63, 64, 65, 66, 67, 68, 69, 70, 71, 72, 73, 74, 75, 76, 77, 78, 79, 80, 81, 82, 83, 84, 85, 86, 87, 88, 89, 90, 91, 92, 93, 94, 95, 96, 97, 98, 99, 100 or more nucleotides in length, and any range therein (e.g., about 2 to about 40, about 2 to about 50, about 2 to about 60, about 4 to about 40, about 4 to about 50, about 4 to about 60, about 5 to about 40, about 5 to about 50, about 5 to about 60, about 9 to about 40, about 9 to about 50, about 9 to about 60, about 10 to about 40, about 10 to about 50, about 10 to about 60, about 40 to about 100, about 50 to about 100, or about 2, 3, 4, 5, 6, 7, 8, 9, 10, 11, 12, 13, 14, 15, 16, 17, 18, 19, 20, 21, 22, 23, 24, 25 nucleotides to about 26, 27, 28, 29, 30, 31, 32, 33, 34, 35, 36, 37, 38, 39, 40, 41, 42, 43, 44, 45, 46, 47, 48, 49, 50, 51, 52, 53, 54, 55, 56, 57, 58, 59, 60, 61, 62, 63, 64, 65, 66, 67, 68, 69, 70, 71, 72, 73, 74, 75, 76, 77, 78, 79, 80, 81, 82, 83, 84, 85, 86, 87, 88, 89, 90, 91, 92, 93, 94, 95, 96, 97, 98, 99, 100 or more nucleotides in length (e.g., about 105, 110, 115, 120, 130, 140 150 or more nucleotides in length).

[0237] As used herein, a “target nucleic acid”, “target DNA,” “target nucleotide sequence,” “target region,” or a “target region in the genome” refers to a region of an organism's genome that is fully complementary (100% complementary) or substantially complementary (e.g., at least 70% complementary (e.g., 70%, 71%, 72%, 73%, 74%, 75%, 76%, 77%, 78%, 79%, 80%, 81%, 82%, 83%, 84%, 85%, 86%, 87%, 88%, 89%, 90%, 91%, 92%, 93%, 94%, 95%, 96%, 97%, 98%, 99%, or more)) to a spacer sequence in a guide RNA of this invention (e.g., the spacer is substantially complementary to the target strand of the target nucleic acid). A target region useful for a CRISPR-Cas system may be located immediately 3′ (e.g., Type V CRISPR-Cas system) or immediately 5′ (e.g., Type II CRISPR-Cas system) to a PAM sequence in the genome of the organism (e.g., a plant genome). A target region may be selected from any region of at least 15 consecutive nucleotides (e.g., 16, 17, 18, 19, 20, 21, 22, 23, 24, 25, 26, 27, 28, 29, 30 nucleotides, and the like) located immediately adjacent to a PAM sequence on the target strand.

[0238] A “protospacer sequence” refers to the target double stranded DNA and specifically to the portion of the target nucleic acid/target DNA (e.g., or target region in the genome (e.g., nuclear genome, plastid genome, mitochondrial genome), or an extragenomic sequence, such as a plasmid, minichromosome, and the like) that is fully or substantially complementary (and hybridizes) to the spacer sequence of the CRISPR repeat-spacer sequences (e.g., guide RNAs, CRISPR arrays, crRNAs). Thus, the protospacer sequences is complementary to the target strand of the target nucleic acid. In some embodiments, a target nucleic acid may have a first strand and a second strand (double stranded DNA). In some embodiments, the term “first strand” as used herein in reference to a target nucleic acid may refer to a target strand or a bottom strand. In some embodiments, the term “second strand” as used in reference to a target nucleic acid is the strand that is complementary to the first strand (e.g., top strand or non-target strand).

[0239] As understood in the art and as used herein, a “target strand” refers to the strand of a double stranded DNA to which the spacer is complementary and to which the CRISPR-Cas effector protein is recruited, while the “non-target strand” refers to the strand opposite to the target strand in a double stranded nucleic acid. In some embodiments of the present invention, the non-target strand of a double stranded nucleic acid, the strand opposite of the strand to which the CRISPR-Cas effector protein is recruited, is nicked by the CRISPR-Cas effector protein and is edited by the reverse transcriptase. In some embodiments, the target strand of a double stranded nucleic acid, the same strand to which the CRISPR-Cas effector protein is recruited, is nicked by CRISPR-Cas effector protein and is edited by the reverse transcriptase.

[0240] In the case of Type V CRISPR-Cas (e.g., Cas12a) systems and Type II CRISPR-Cas (Cas9) systems, the protospacer sequence is flanked by (e.g., immediately adjacent to) a protospacer adjacent motif (PAM). For Type IV CRISPR-Cas systems, the PAM is located at the 5′ end on the non-target strand and at the 3′ end of the target strand (see below, as an example).

```
        5′-NNNNNNNNNNNNNNNNNNN-3′ RNA Spacer (SEQ ID NO: 54)
                | ||||| ||||||||
3′AAANNNNNNNNNNNNNNNNNNN-5′ Target strand (SEQ ID NO: 55)
    ||||
5′TTTNNNNNNNNNNNNNNNNNNN-3′ Non-target strand (SEQ ID NO: 56)
```

[0241] In the case of Type II CRISPR-Cas (e.g., Cas9) systems, the PAM is located immediately 3′ of the target region. The PAM for Type I CRISPR-Cas systems is located 5′ of the target strand. There is no known PAM for Type III CRISPR-Cas systems. Makarova et al. describes the nomenclature for all the classes, types and subtypes of CRISPR systems (Nature Reviews Microbiology 13:722-736 (2015)). Guide structures and PAMs are described in by R. Barrangou (Genome Biol. 16:247 (2015)).

[0242] Canonical Cas12a PAMs are T rich. In some embodiments, a canonical Cas12a PAM sequence may be 5′-TTN, 5′-TTTN, or 5′-TTTV. In some embodiments, canonical Cas9 (e.g., S. pyogenes) PAMs may be 5′-NGG-3′. In some embodiments, non-canonical PAMs may be used but may be less efficient.

[0243] Additional PAM sequences may be determined by those skilled in the art through established experimental and computational approaches. Thus, for example, experimental approaches include targeting a sequence flanked by all possible nucleotide sequences and identifying sequence members that do not undergo targeting, such as through the transformation of target plasmid DNA (Esvelt et al. 2013. Nat. Methods 10:1116-1121; Jiang et al. 2013. Nat. Biotechnol. 31:233-239). In some aspects, a computational approach can include performing BLAST searches of natural spacers to identify the original target DNA sequences in bacteriophages or plasmids and aligning these sequences to determine conserved sequences adjacent to the target sequence (Briner and Barrangou. 2014. Appl. Environ. Microbiol. 80:994-1001; Mojica et al. 2009. Microbiology 155:733-740).

[0244] In some embodiments, the present invention further provides a method of modifying a target nucleic acid, the method comprising: contacting the target nucleic acid at a first site with (a) (i) a first CRISPR-Cas effector protein; and (ii) a first extended guide nucleic acid (e.g., first extended CRISPR RNA, first extended CRISPR DNA, first extended crRNA, first extended crDNA); and (b) (i) a second CRISPR-Cas effector protein, (ii) a first reverse transcriptase; and (ii) a first guide nucleic acid, thereby modifying the target nucleic acid. In some embodiments, the method of the invention may further comprise contacting the target nucleic acid with (a) a third CRISPR-Cas effector protein; and (b) a second guide nucleic acid, wherein the third CRISPR-Cas effector protein nicks a site on the first strand of the target nucleic acid that is located about 10 to about 125 base pairs (either 5′ or 3′) from the second site on the second strand that has been nicked by the second CRISPR-Cas effector protein, thereby improving mismatch repair. In some embodiments, the method of the invention may further comprise contacting the target nucleic acid with: (a) a fourth CRISPR-Cas effector protein; (b) a second reverse transcriptase, and (c) a second extended guide nucleic acid (e.g., second extended CRISPR RNA, second extended CRISPR DNA, second extended crRNA, second extended crDNA), wherein the second extended guide nucleic acid targets (spacer is substantially complementary to/binds to) a site on the first strand of the target nucleic acid, thereby modifying the target nucleic acid. A CRISPR-Cas effector protein (e.g., a first, second, third, fourth) useful with the invention may be any Type I, Type II, Type III, Type IV, or Type V CRISPR-Cas effector protein as described herein, in any combination. In some embodiments, the CRISPR-Cas effector protein may be Cas9, C2c3, Cas12a (also referred to as Cpf1), Cas12b, Cas12c, Cas12d, Cas12e, Cas13a, Cas13b, Cas13c, Cas13d, Cas1, Cas1B, Cas2, Cas3, Cas3′, Cas3″, Cas4, Cas5, Cas6, Cas7, Cas8, Cas9 (also known as Csn1 and Csx12), Cas10, Csy1, Csy2, Csy3, Cse1, Cse2, Csc1, Csc2, Csa5, Csn2, Csm2, Csm3, Csm4, Csm5, Csm6, Cmr1, Cmr3, Cmr4, Cmr5, Cmr6, Csb1, Csb2, Csb3, Csx17, Csx14, Csx10, Csx16, CsaX, Csx3, Csx1, Csx15, Csf1, Csf2, Csf3, Csf4 (dinG), and/or Csf5.

[0245] In some embodiments, an extended guide nucleic acid useful with the first CRISPR-Cas effector protein may comprise (a) a CRISPR nucleic acid (CRISPR RNA, CRISPR DNA, crRNA, crDNA); and (b) an extended portion comprising a primer binding site and a reverse transcriptase template (RT template), wherein the RT template encodes a modification to be incorporated into the target nucleic acid as described herein (e.g., encodes an edit located in any position within an RT template with the position location relative to the position of a protospacer adjacent motif (PAM) of the target nucleic acid, optionally an edit located at nucleotide position −1 to nucleotide position 19, nucleotide position 10 to nucleotide position 17, or nucleotide position 12 to nucleotide position 15).

[0246] In some embodiments, the CRISPR nucleic acid of the extended guide nucleic acid comprises a spacer sequence capable of binding to (having substantial homology to) a first site on the first strand of the target nucleic acid.

[0247] In some embodiments, a guide nucleic acid useful with a CRISPR-Cas effector protein comprises a CRISPR nucleic acid (CRISPR RNA, CRISPR DNA, crRNA, crDNA). In some embodiments, the CRISPR nucleic acid of the first guide nucleic acid comprises a spacer sequence that binds to a second site on the first strand of the target nucleic acid that is upstream (3′) of the first site on the first strand of the target nucleic acid.

[0248] In some embodiments, the second CRISPR-Cas effector protein may be a CRISPR-Cas fusion protein comprising a CRISPR-Cas effector protein domain fused to the reverse transcriptase.

[0249] In some embodiments, the second CRISPR-Cas effector protein may be a CRISPR-Cas fusion protein comprising a CRISPR-Cas effector protein domain fused to a peptide tag and the reverse transcriptase may be a reverse transcriptase fusion protein comprising a reverse transcriptase domain that is fused to an affinity polypeptide capable of binding the peptide tag.

[0250] In some embodiments, the first guide nucleic acid may be linked to an RNA recruiting motif and the reverse transcriptase may be a reverse transcriptase fusion protein comprising a reverse transcriptase domain that is fused to an affinity polypeptide capable of binding the RNA recruiting motif.

[0251] In some embodiments, the target nucleic acid may further be contacted with a 5′-3′ exonuclease, optionally wherein the 5′-3′ exonuclease is fused to the first CRISPR-Cas effector protein. In some embodiments, a 5′-3′ exonuclease may be a fusion protein comprising a 5′-3′ exonuclease fused to a peptide tag and the first CRISPR-Cas effector protein may be a fusion protein comprising a CRISPR-Cas effector protein domain fused to an affinity polypeptide that is capable of binding to the peptide tag. In some embodiments, a 5′-3′ exonuclease may be a fusion protein comprising a 5′-3′ exonuclease fused to an affinity polypeptide that is capable of binding to the peptide tag and the first CRISPR-Cas effector protein may be a fusion protein comprising a CRISPR-Cas effector protein domain fused to a peptide tag. In some embodiments, a 5′-3′ exonuclease may be a fusion protein comprising a 5′-3′ exonuclease that is fused to an affinity polypeptide that is capable of binding to an RNA recruiting motif and the extended guide nucleic acid is linked to an RNA recruiting motif.

[0252] In some embodiments, the invention further provides contacting a target nucleic acid with one or more single stranded DNA binding proteins (ssDNA BPs). Single-stranded DNA binding proteins (ssDNA BP) may be useful for stabilizing the single stranded DNAs that are generated during the methods of the invention. Without wishing to be bound by any particular theory, ssDNA BPs may protect DNA strands from degradation or otherwise prevent them from becoming unavailable for RT-mediated priming and polymerization. Single stranded DNA binding proteins useful with the invention can include but are not limited to, those obtained from Example ssDNA BPs include, but are not limited to, those from a human, a bacterium or a phage. In some embodiments an ssDNA BP includes, but is not limited to, hRad51 (optionally, hRad51_S208E_A209D) (SEQ ID NO:123), hRad52 (SEQ ID NO:124), BsRecA (SEQ ID NO:125), EcRecA (SEQ ID NO:126), T4ssB (SEQ ID NO:127) and/or Brex27 (SEQ ID NO:128). In some embodiments, a target nucleic acid may be contacted with one or more ssDNA BPs, wherein the ssDNA BPs may be fused to the C-terminus or the N-terminus of a CRISPR-Cas effector protein (e.g., a CRISPR-Cas effector protein, a first CRISPR-Cas effector protein, a second CRISPR-Cas effector protein, a third CRISPR-Cas effector protein and/or a fourth CRISPR-Cas effector protein). A ssDNA BP may be fused to the C-terminus or the N-terminus of the CRISPR-Cas effector protein/domain. In some embodiments, the ssDNA BP is fused to a Type II CRISPR-Cas effector protein/domain and/or a Type V CRISPR-Cas effector protein/domain.

[0253] In some embodiments, the methods of the invention may further comprise reducing double strand breaks by introducing a chemical inhibitor of non-homologous end joining (NHEJ), by introducing a CRISPR guide nucleic acid or an siRNA targeting an NHEJ protein to transiently knock-down expression of the NHEJ protein, or by introducing a polypeptide that prevents NHEJ. In some embodiments, the polypeptide that prevents NHEJ can include, but is not limited to, a Gam protein, optionally wherein the Gam protein is Escherichia phage Mu Gam protein (e.g., SEQ ID NO:147).

[0254] In some embodiments, an extended guide nucleic acid is provided, the extended guide nucleic acid comprising (i) a Type V CRISPR nucleic acid or Type II CRISPR nucleic acid (Type II or Type V CRISPR RNA, Type II or Type V CRISPR DNA, Type II or Type V crRNA, Type II or Type V crDNA) and/or a Type V CRISPR nucleic acid or Type II CRISPR nucleic acid and a tracr nucleic acid (e.g., Type II or Type V tracrRNA, Type II or Type V tracrDNA); and (ii) an extended portion comprising a primer binding site and a reverse transcriptase template (RT template) (RTT). In some embodiments, the extended guide nucleic acid further comprise a structured RNA motif, optionally wherein the structured RNA motif is located at the 3′ end of the extended guide nucleic acid. In some embodiments, the structured RNA motif can include, but is not limited to, AsCpf1 BB (SEQ ID NO:189), BoxB (SEQ ID NO:190), pseudoknot (decoy) (SEQ ID NO:95, SEQ ID NO:203), pseudoknot (tEvoPreQ1) (SEQ ID NO:191), fmpknot (SEQ ID NO:192), mpknot (SEQ ID NO:193), MS2 (SEQ ID NO:194), PP7 (SEQ ID NO:195), SLBP (SEQ ID NO:196), TAR (SEQ ID NO:197), and/or ThermoPh (SEQ ID NO:198). In some embodiments, the structured RNA motif is a pseudoknot, optionally wherein the pseudoknot is located at the 3′ end of the extended guide nucleic acid. In some embodiments, a pseudoknot useful with the invention may be a naturally occurring pseudoknot or a synthetic pseudoknot. A pseudoknot may also be referred to herein as a pseudoknot-like structure, a pseudoknotted hairpin and/or a decoy pseudoknotted hairpin. In some embodiments, the pseudoknot may be located at the 3′ end of the extended guide nucleic acid. In some embodiments, when the extended guide comprises 5′-3′ crRNA-RTT-PBS, the pseudoknot may be located 5′ of the RTT or 3′ of the PBS. In some embodiments, when the extended guide comprises the extension (extended portion) at the 5′ end of the crRNA, a pseudoknot may be located 3′ of the RTT or 5′ of the PBS. In some embodiments, a pseudoknot may be located at the 5′ end of an extended guide nucleic acid followed 5′-3′ by the PBS then RTT, the natural pseudoknot in the crRNA (e.g., in the repeat sequence), followed by the complimentary region (e.g., spacer sequence).

[0255] In some embodiments, a pseudoknot useful with the extended guide can include, but is not limited to, a tEvoPreQ1 Pseudoknot comprising the nucleic acid sequence of SEQ ID NO:158, an EvoPreQ1 Pseudoknot comprising the nucleic acid sequence of SEQ ID NO:191 and/or a pseudoknot comprising the nucleic acid sequence of SEQ ID NO:95 or SEQ ID NO:203. An extended guide nucleic acid of this invention may be comprised in an expression cassette, optionally wherein the expression cassette is comprised in a vector.

[0256] In some embodiments, a complex is provided, the complex comprising: (a) a Type II CRISPR-Cas effector protein or a Type V CRISPR-Cas effector protein; (b) a reverse transcriptase, and (c) an extended guide nucleic acid (e.g., extended CRISPR RNA, extended CRISPR DNA, extended crRNA, extended crDNA; e.g., a tagDNA, tagRNA).

[0257] In some embodiments, the Type II or Type V CRISPR-Cas effector protein of a complex may be a fusion protein comprising a Type II or Type V CRISPR-Cas effector protein domain fused to a peptide tag. In some embodiments, the Type II or Type V CRISPR-Cas effector protein of the complex may be a fusion protein comprising a Type II or Type V CRISPR-Cas effector protein domain fused to an affinity polypeptide that is capable of binding a peptide tag. In some embodiments, the Type II or Type V CRISPR-Cas effector protein of the complex may be a fusion protein comprising a Type II or Type V CRISPR-Cas effector protein domain fused to an affinity polypeptide that is capable of binding an RNA recruiting motif.

[0258] In some embodiments, the reverse transcriptase of the complex may be a fusion protein comprising a reverse transcriptase domain fused to a peptide tag. In some embodiments, the reverse transcriptase of the complex may be a fusion protein comprising reverse transcriptase domain fused to an affinity polypeptide that is capable of binding a peptide tag. In some embodiments, the reverse transcriptase of the complex may be a fusion protein comprising reverse transcriptase domain fused to an affinity polypeptide that is capable of binding an RNA recruiting polypeptide. In some embodiments, the complex may further comprise a guide nucleic acid (e.g., extended CRISPR RNA, extended CRISPR DNA, extended crRNA, extended crDNA). In some embodiments, the complex may further comprise an extended guide nucleic acid (e.g., extended CRISPR RNA, extended CRISPR DNA, extended crRNA, extended crDNA).

[0259] In some embodiments, the extended guide nucleic acid of the complex may further comprise a pseudoknot. In some embodiments, the pseudoknot comprised in the extended guide nucleic acid of the complex may be located at the 3′ end of the extended guide nucleic acid. In some embodiments, a pseudoknot useful with an extended guide nucleic acid of a complex of the invention may be a naturally occurring pseudoknot or a synthetic pseudoknot. A pseudoknot may also be referred to herein as a pseudoknot-like structure, a pseudoknotted hairpin and/or a decoy pseudoknotted hairpin. In some embodiments, the pseudoknot may be located at the 3′ end of the extended guide nucleic acid. In some embodiments, when the extended guide comprises 5′-3′ crRNA-RTT-PBS, the pseudoknot may be located 5′ of the RTT or 3′ of the PBS. In some embodiments, a pseudoknot can include, but is not limited to, a tEvoPreQ1 Pseudoknot comprising the nucleic acid sequence of SEQ ID NO:158, an EvoPreQ1 Pseudoknot comprising the nucleic acid sequence of SEQ ID NO:191 or a pseudoknot comprising the nucleic acid sequence of SEQ ID NO:95 or SEQ ID NO:203.

[0260] In some embodiments, a complex of the invention may be comprised in an expression cassette, optionally wherein the expression cassette is comprised in a vector. In some embodiment, the expression cassette comprising a complex of the invention may be codon optimized for expression in an organism as described herein, optionally wherein the organism is wherein the organism is an animal such as a human, a plant, a fungus, an archaeon, a bacterium or a virus.

[0261] The present invention further provides an expression cassette codon optimized for expression in an organism, comprising 5′ to 3′ (a) polynucleotide encoding a promoter sequence, (b) a polynucleotide encoding a Type V CRISPR-Cas nuclease (e.g., Cpf1 (Cas12a), dCas12a and the like) or a Type II CRISPR-Cas nuclease (e.g., Cas9, dCas9 and the like) that is codon optimized for expression in the organism; (c) a linker sequence; and (d) a polynucleotide encoding a reverse transcriptase that is codon-optimized for expression in the organism, optionally wherein the organism is wherein the organism is an animal such as a human, a plant, a fungus, an archaeon, a bacterium or a virus. Further provided is an expression cassette codon optimized for expression in a plant, comprising 5′ to 3′ (a) polynucleotide encoding a plant specific promoter sequence (e.g., ZmUbi1, MtUb2, RNA polymerase II (Pol II)), (b) a plant codon-optimized polynucleotide encoding a Type V CRISPR-Cas nuclease (e.g., Cpf1 (Cas12a), dCas12a and the like); (c) a linker sequence; and (d) a plant codon-optimized polynucleotide encoding a reverse transcriptase. In some embodiments, a linker sequence may be an amino acid or peptide linker as described herein. In some embodiments, the reverse transcriptase in an expression cassette may be fused to one or more ssRNA binding domains (RBDs).

[0262] The present invention further provides an expression cassette codon optimized for expression in a plant, comprising (a) a polynucleotide encoding a plant specific promoter sequence (e.g. ZmUbi1, MtUb2), and (b) an extended RNA guide sequence, wherein the extended guide nucleic acid comprises an extended portion comprising at its 3′ end a primer binding site and an edit to be incorporated into the target nucleic acid (e.g., reverse transcriptase template), optionally wherein the extended guide nucleic acid is comprised in an expression cassette, optionally wherein the extended guide nucleic acid is operably linked to a Pol II promoter.

[0263] In some embodiments, the expression cassette comprises an extended guide nucleic acid that further comprises a structured RNA motif, optionally wherein the structured RNA motif is located at the 3′ end of the extended guide nucleic acid. In some embodiments, the structured RNA motif can include, but is not limited to, AsCpf1 BB (SEQ ID NO:189), BoxB (SEQ ID NO:190), pseudoknot (decoy) (SEQ ID NO:95, SEQ ID NO:203), pseudoknot (tEvoPreQ1) (SEQ ID NO:191), fmpknot (SEQ ID NO:192), mpknot (SEQ ID NO:193), MS2 (SEQ ID NO:194), PP7 (SEQ ID NO:195), SLBP (SEQ ID NO:196), TAR (SEQ ID NO:197), and/or ThermoPh (SEQ ID NO:198). In some embodiments, the structured RNA motif is a pseudoknot, optionally wherein the pseudoknot is located at the 3′ end of the extended guide nucleic acid. In some embodiments, a pseudoknot useful with the extended guide can include, but is not limited to, a pseudoknot comprising the nucleic acid sequence of SEQ ID NO:158, SEQ ID NO:191, SEQ ID NO:95 and/or SEQ ID NO:203.

[0264] In some embodiments, a plant specific promoter useful with an expression cassette of the invention may be associated with an intron or is a promoter region comprising an intron (e.g., ZmUbi1 comprising an intron; MtUb2 comprising an intron).

[0265] In some embodiments, the expression cassette may be codon optimized for expression in a dicot plant. In some embodiments, the expression cassette may be codon optimized for expression in a monocot plant.

[0266] In some embodiments, the present invention provides methods for modifying a target nucleic acid in a plant or plant cell, comprising introducing one or more expression cassettes of the invention into the plant or plant cell, thereby modifying the target nucleic acid in the plant or plant cell to produce a plant or plant cell comprising the modified target nucleic acid. In some embodiments, the methods of the invention further comprise regenerating a plant from the plant cell comprising the modified target nucleic acid to produce a plant comprising the modified target nucleic acid. In some embodiments, the methods of the invention comprise contacting the target nucleic acid at a temperature of about 20° C. to 42° C. (e.g., about 20, 21, 22, 23, 24, 25, 26, 27, 28, 29, 30, 31, 32, 33, 34, 35, 36, 37, 38, 39, 40, 41, or 42° C., and any value or range therein.

[0267] In some embodiments, the invention provides cells comprising one or more polynucleotides, guide nucleic acids, nucleic acid constructs, expression cassettes or vectors of the invention.

[0268] When used in combination with guide nucleic acids, the polynucleotides/nucleic acid constructs/expression cassettes of the invention of the invention may be used to modify a target nucleic acid. A target nucleic acid may be contacted with a polynucleotide/nucleic acid construct/expression cassette of the invention prior to, concurrently with or after contacting the target nucleic acid with the guide nucleic acid. In some embodiments, the polynucleotides of the invention and a guide nucleic acid may be comprised in the same expression cassette or vector and therefore, a target nucleic acid may be contacted concurrently with the polynucleotides of the invention and guide nucleic acid. In some embodiments, the polynucleotides of the invention and a guide nucleic acid may be in different expression cassettes or vectors and thus, a target nucleic acid may be contacted with the polynucleotides of the invention prior to, concurrently with, or after contact with a guide nucleic acid.

[0269] A target nucleic acid of any organism may be modified (e.g., mutated, e.g., base edited, cleaved, nicked, etc.) using the polynucleotides and methods of the invention, including, but not limited to, eukaryotic organisms or prokaryotic organisms, such as for example, a plant, an animal, a bacterium, an archaeon, a fungus and/or a virus. Any animal or cell thereof may be modified (e.g., mutated, e.g., base edited, cleaved, nicked, etc.) using the polynucleotides of the invention including, but not limited to an insect, a fish, a bird, an amphibian, a reptile, and/or a mammal. Exemplary mammals for which this invention may be useful include, but are not limited to, primates (human and non-human (e.g., a chimpanzee, baboon, monkey, gorilla, etc.)), cats, dogs, ferrets, gerbils, hamsters, cows, pigs, horses, goats, donkeys, or sheep. In some embodiments, a fungal target organism can include, but is not limited to, a Zygomycota, Ascomycota, Basidiomycota, and Deuteromycota (fungi imperfecti), optionally wherein the fungal target organism may be an ascomycete, optionally a yeast. In some embodiments, a fungal target organism may be from the genera Saccharomyces, optionally Saccharomyces cerevisiae.

[0270] A target nucleic acid of any plant or plant part may be modified (e.g., mutated, e.g., base edited, cleaved, nicked, etc.) using the polynucleotides of the invention. Any plant (or groupings of plants, for example, into a genus or higher order classification) may be modified using the nucleic acid constructs of this invention including an angiosperm, a gymnosperm, a monocot, a dicot, a C3, C4, CAM plant, a bryophyte, a fern and/or fern ally, a microalgae, and/or a macroalgae. A plant and/or plant part useful with this invention may be a plant and/or plant part of any plant species/variety/cultivar. The term “plant part,” as used herein, includes but is not limited to, embryos, pollen, ovules, seeds, leaves, stems, shoots, flowers, branches, fruit, kernels, ears, cobs, husks, stalks, roots, root tips, anthers, plant cells including plant cells that are intact in plants and/or parts of plants, plant protoplasts, plant tissues, plant cell tissue cultures, plant calli, plant clumps, and the like. As used herein, “shoot” refers to the above ground parts including the leaves and stems. Further, as used herein, “plant cell” refers to a structural and physiological unit of the plant, which comprises a cell wall and also may refer to a protoplast. A plant cell can be in the form of an isolated single cell or can be a cultured cell or can be a part of a higher-organized unit such as, for example, a plant tissue or a plant organ.

[0271] Non-limiting examples of plants useful with the present invention include turf grasses (e.g., bluegrass, bentgrass, ryegrass, fescue), feather reed grass, tufted hair grass, miscanthus, arundo, switchgrass, vegetable crops, including artichokes, kohlrabi, arugula, leeks, asparagus, lettuce (e.g., head, leaf, romaine), malanga, melons (e.g., muskmelon, watermelon, crenshaw, honeydew, cantaloupe), cole crops (e.g., brussels sprouts, cabbage, cauliflower, broccoli, collards, kale, Chinese cabbage, bok choy), cardoni, carrots, napa, okra, onions, celery, parsley, chick peas, parsnips, chicory, peppers, potatoes, cucurbits (e.g., marrow, cucumber, zucchini, squash, pumpkin, honeydew melon, watermelon, cantaloupe), radishes, dry bulb onions, rutabaga, eggplant, salsify, escarole, shallots, endive, garlic, spinach, green onions, squash, greens, beet (sugar beet and fodder beet), sweet potatoes, chard, horseradish, tomatoes, turnips, and spices; a fruit crop such as apples, apricots, cherries, nectarines, peaches, pears, plums, prunes, cherry, quince, fig, nuts (e.g., chestnuts, pecans, pistachios, hazelnuts, pistachios, peanuts, walnuts, macadamia nuts, almonds, and the like), citrus (e.g., clementine, kumquat, orange, grapefruit, tangerine, mandarin, lemon, lime, and the like), blueberries, black raspberries, boysenberries, cranberries, currants, gooseberries, loganberries, raspberries, strawberries, blackberries, grapes (wine and table), avocados, bananas, kiwi, persimmons, pomegranate, pineapple, tropical fruits, pomes, melon, mango, papaya, and lychee, a field crop plant such as clover, alfalfa, timothy, evening primrose, meadow foam, corn/maize (field, sweet, popcorn), hops, jojoba, buckwheat, safflower, quinoa, wheat, rice, barley, rye, millet, sorghum, oats, triticale, sorghum, tobacco, kapok, a leguminous plant (beans (e.g., green and dried), lentils, peas, soybeans), an oil plant (rape, canola, mustard, poppy, olive, sunflower, coconut, castor oil plant, cocoa bean, groundnut, oil palm), duckweed, Arabidopsis, a fiber plant (cotton, flax, hemp, jute), Cannabis (e.g., Cannabis sativa, Cannabis indica, and Cannabis ruderalis), lauraceae (cinnamon, camphor), or a plant such as coffee, sugar cane, tea, and natural rubber plants; and/or a bedding plant such as a flowering plant, a cactus, a succulent and/or an ornamental plant (e.g., roses, tulips, violets), as well as trees such as forest trees (broad-leaved trees and evergreens, such as conifers; e.g., elm, ash, oak, maple, fir, spruce, cedar, pine, birch, cypress, eucalyptus, willow), as well as shrubs and other nursery stock. In some embodiments, the nucleic acid constructs of the invention and/or expression cassettes and/or vectors encoding the same may be used to modify maize, soybean, wheat, canola, rice, tomato, pepper, sunflower, raspberry, blackberry, black raspberry and/or cherry.

[0272] The present invention further comprises a kit or kits to carry out the methods of this invention. A kit of this invention can comprise reagents, buffers, and apparatus for mixing, measuring, sorting, labeling, etc., as well as instructions and the like as would be appropriate for modifying a target nucleic acid.

[0273] In some embodiments, the invention provides a kit comprising one or more nucleic acid constructs of the invention and/or expression cassettes and/or vectors comprising the same, with optional instructions for the use thereof. In some embodiments, a kit may further comprise a CRISPR-Cas guide nucleic acid (or extended guide nucleic acid) (corresponding to the CRISPR-Cas effector protein encoded by the polynucleotide of the invention) and/or expression cassette and/or vector comprising the same. In some embodiments, the guide nucleic acid/extended guide nucleic acid may be provided on the same expression cassette and/or vector as one or more polynucleotides of the invention. In some embodiments, a guide nucleic acid/extended guide nucleic acid may be provided on a separate expression cassette or vector from that comprising one or more of the polynucleotides of the invention.

[0274] In some embodiments, the kit may further comprise a nucleic acid construct encoding a guide nucleic acid, wherein the construct comprises a cloning site for cloning of a nucleic acid sequence identical or complementary to a target nucleic acid sequence into backbone of the guide nucleic acid.

[0275] In some embodiments, a nucleic acid construct of the invention may be an mRNA that may encode one or more introns within the encoded polynucleotide. In some embodiments, an expression cassette and/or vector comprising one or more polynucleotides of the invention, may further encode one or more selectable markers useful for identifying transformants (e.g., a nucleic acid encoding an antibiotic resistance gene, herbicide resistance gene, and the like).

[0276] The invention will now be described with reference to the following examples. It should be appreciated that these examples are not intended to limit the scope of the claims to the invention but are rather intended to be exemplary of certain embodiments. Any variations in the exemplified methods that occur to the skilled artisan are intended to fall within the scope of the invention.

### EXAMPLES

[0277] RNA-encoded DNA-replacement of alleles (REDRAW) utilizes a type V Cas effector, an enzyme which polymerizes from a DNA:RNA hybrid from a free DNA 3′ end (annealing site, AS), and an extended guide nucleic acid (i.e., a targeted allele guide RNA (tagRNA)). These three macromolecules work in tandem to i) locate the CRISPR enzyme to the genomic site of interest using a CRISPR effector and the crRNA portion of the tagRNA, ii) nick or cut the DNA to produce a free 3′ end, iii) provide a portion of the tagRNA which anneals to the free 3′ end of the DNA, iv) provide a portion of tagRNA which provides a template for the RNA-dependent DNA polymerase, and v) allow the termination of reverse transcription either by enzyme collision, natural termination, or encountering a stable hairpin.

[0278] We tested the REDRAW system using a nontarget-stand (NTS) nickase version of LbCas12a_R1138A and a RT from Moloney Murine Leukemia Virus (M-MuLV). LbCas12a_R1138A was expected to be an NTS nickase based on alignment with an the previously described AsCas12a R1226A mutation. We demonstrate in Figure XXX that LbCas12a_R1138A is, indeed, a nickase. The LbCas12a used was either RNAse (+) or had a mutation which prevented RNAse activity (H759A). The LbCas12a_R1138A H759A mutant was used to prevent self-processing of the tagRNA when making the 5′ extension or when incorporating a 3′ hairpin (e.g., a pseudoknot comprising a hairpin element).

[0279] The tagRNAs tested contained crRNAs containing either 5′ or 3′ extensions. Various annealing site lengths were tested allowing for shorter or longer DNA:RNA hybrids to form from at the nicked non-target strand. Various lengths of RNA template were tested as well. Finally, two different hairpins were also incorporated into a LbCas12a crRNA sequence, a pseudoknotted hairpin design and a decoy pseudoknotted hairpin design.

### Example 1

### LbCas12a_R1138A Nickase Assay

[0280] A nucleic acid construct was synthesized comprising LbCas12a, followed by a nucleoplasmin NLS, and a 6x histidine tag (GeneWiz) (SEQ ID NO:57) and cloned into a pET28a vector between NcoI and XhoI, generating pWISE450 (SEQ ID NO:58). There was an additional glycine added to the sequence between Met-1 and Ser-2 to facilitate cloning. Numbering presented herein excludes this extra glycine. Then the R1138A mutation was made using a QuickChange II site-directed mutagenesis kit (Agilent) according to manufacturer's instructions. These expression plasmids were then transformed into BL21 (DE3) Star competent E. coli cells (ThermoFisher Scientific).

[0281] The BL21(DE3) Star cells were grown in Luria Broth and 50 ug/ml of kanamycin at 37° C. until an optical density of A600=0.5 was achieved. Isopropyl (3-d-1-thiogalactopyranoside (IPTG) was added to 0.5 mM and protein was induced overnight at 18° C. Cells were pelleted at 5,000×g. Purification was accomplished using two columns: a HisTrap column followed by a MonoS column (GE Healthcare) according to manufacturer's protocols.

[0282] CRISPR RNA (crRNA) was synthesized by Synthego with the sequence AAUUUCUACUAAGUGUAGAUGGAAUCCCUUCUGCAGCACCUGG (SEQ ID NO:59) (where the guide portion is in bold font).

[0283] The plasmid to be cleaved was pUC19 with the following sequence inserted: TTTCCGGATCCCTTCTGCAGCACCTGG (SEQ ID NO:60) where the portion of the sequence in bold font is a PAM sequence recognized by LbCas12.a and the remainder (regular font) is the protospacer sequence. The pUC 19 plasmid was transformed into XL1-Blue (Agilent) (E. coli), and subsequently purified using Qiagen plasmid spin minikits.

[0284] The nuclease assay was accomplished by mixing 10:10:1 ratios of LbCas12a_R1138:crRNA:plasmid, incubated for 15 minutes at 37° C. in New England Biolabs buffer 2.1, heat inactivated for 20 minutes at 80° C., and loaded onto a 1% TAE-agarose gel with SYBR-Safe stain (Invitrogen) embedded to stain the DNA. As shown in FIG. 4 in an in vitro assay, LbCas12a_R1138A is a nickase. As shown in lanes 2 and 3, a supercoiled 2.8 kB plasmid ran with an apparent size of 2.0 kB (lane 2) until a double-stranded break was generated by wildtype LbCas12a (lane 3). The mutant enzyme LbCas12a_R1138A predominantly generated a nicked product running with the apparent size of 5.0 kB. Lanes 4-6 show that increasing concentrations of the mutant enzyme did not alter the ratio until extremely high concentrations of enzyme were used resulting in general nuclease digestion of the plasmid (256 nM).

### REDRAW Editor Plasmid Design and Construction—Bacterial Screen

[0285] REDRAW (RNA-encoded DNA-replacement of alleles) expression constructs were synthesized by solid state synthesis and cloned into expression vector pET28a(+) in between the NcoI and XhoI restriction sites. The REDRAW expression vectors contain a ColE1 origin of replication, a kanamycin resistance marker, and a REDRAW editor under control of a T7 promoter and terminator. The REDRAW editors contain either a Cas12a nickase (R1138A) or an Rnase dead Cas12a nickase (R1138A, H759A) fused to Mu-LV reverse transcriptase MuLV(5M) (see, e.g., SEQ ID NO:97) (Murine leukemia virus reverse transcriptase with five mutations—D200N+L603W+T330P+T306K+W313F) (Anzalone et al. Nature 576 (7785):149-157 (2019)) with an XTEN or 5R linker. All REDRAW editor sequences were E. coli codon optimized. The REDRAW editor configurations tested are shown in FIG. 5. Two configurations provided in FIG. 5 had Cas12a N-terminal to the reverse transcriptase, and two configurations had Cas12a C-terminal to the reverse transcriptase. The tested configurations were built with a Cas12a variant that had an additional H759A mutation to prevent processing of tagRNAs that contain a 5′ extension.

tagRNA Plasmid Design and Construction-Bacterial Screen

[0286] The sequences of the tagRNA (targeted allele guide RNA) library were designed using an algorithm that assembled a Cas12a spacer and scaffold sequence together with a reverse transcriptase template and primer binding site unique for each target. The design parameters, shown in Table 1, span a wide range of primer binding site and reverse transcriptase template lengths. The desired changes, shown in Table 3, were designed to confer resistance to antibiotics following successful editing.

TABLE 1
Conformations of tagRNAs tested in the first library

| | | | Targets in |
|---|---|---|---|
| Type | PBS | RTT | Library |
| 5′ | 10-20 nt, | 10-150 nt, | 2 genomic, |
| extension | 1 nt steps | 5 nt steps | 3 plasmid |
| 3′ | 10-20 nt, | 10-150 nt, | 2 genomic, |
| extension | 1 nt steps | 5 nt steps | 3 plasmid |

FIG. 6 shows the configurations of the tagRNAs in the first library. Both 5′ and 3′ extensions containing the RTT and PBS were included in the library.

[0287] A second library was designed in a similar fashion as the first, while additionally evaluating whether the presence of a hairpin, located just 3′ of the spacer in the 3′ tagRNA extension configuration, would improve REDRAW editing. The design parameters, shown in Table 2, again interrogate a wide range of primer binding site (PBS) and reverse transcriptase template (RTT) lengths, but also focus on the region of RTT length found to be functional from the first library. Both 5′ and 3′ extensions containing the RTT and PBS were included in the library. Additionally, variants containing a decoy hairpin were also included in the second tagRNA library. As a hairpin was desired that would be similar to the natural LbCas12a scaffold sequence but would not be recognized and cleaved by the Cas12a protein, an existing hairpin with similar architecture to the LbCas12a hairpin was found in the HIV-1 RNA genome and modified by the addition of a UA sequence to form a pseudoknot, as shown in FIG. 7.

TABLE 2
Conformations of tagRNAs tested in the second library

| TagRNA | Range of | Range of | Decoy | |
|---|---|---|---|---|
| Extension | PBS | RTT | Hairpin | Targets |
| 5′ end | 10-20 nt, | 10-190 nt, | None | 2 genomic, |
| | 1-nt steps | 5-nt steps | | 3 plasmid |
| 3/end | 10-20 nt, | 10-190 nt, | With and | 2 genomic, |
| | 1-nt steps | 5-nt steps; | without | 3 plasmid |
| | | 65-85 nt, | | |
| | | 2-nt steps | | |

tagRNA Plasmid Construction for Bacterial Screen

[0288] The base plasmid for the tagRNA library was generated by solid state synthesis and cloning of a holder fragment into pTwist Amp Medium Copy (TWIST BIOSCIENCE®). The plasmid contains a p15A origin of replication and an ampicillin resistance marker. The tagRNAs are constitutively expressed from a synthetic BbaJ23119 promoter and are terminated by a T7 terminator. The first tagRNA library evaluated was synthesized and cloned into the tagRNA base vector by an external vendor (Genewiz). For the second library, oligos were synthesized and then cloned into the tagRNA base vector using an NEB HiFi Assembly kit according to manufacturer's instructions. Library diversity was investigated by colony PCR and Sanger sequencing of 72 clones from the library, to ensure that a wide range of PBS, RTT, and targets were included in the library and that there was not a substantial bias.

### Reporter Plasmid Design and Construction

[0289] A base reporter plasmid containing a CloDF13 origin of replication, chloramphenicol resistance marker, and spectinomycin resistance marker (aadA) was constructed by PCR amplification of the CloDF13 origin of replication and chloramphenicol resistance marker and ligating it with a PCR-amplified aadA resistance marker. Three reporter plasmids containing variants of aadA were then constructed by cutting out the wild type aadA gene in between the BamHI and BgIII restriction sites and ligating in gene blocks synthesized that contained a stop codon at residue position Thr61, Leu115, or Asp132. All reporter plasmids were verified by Sanger sequencing after construction. In addition, reporter plasmids containing an aadA variant with a stop codon in the coding sequence were verified as both spectinomycin and streptomycin sensitive prior to using them in REDRAW tagRNA screening experiments.

### Targets for REDRAW Editing—Bacterial Screen

[0290] Five targets were tested in the REDRAW editing experiments, shown below in Table 3. Two genomic and three plasmid targets were used in all cases. Successful REDRAW editing at any of the targets results in resistance to an antibiotic (nalidixic acid or streptomycin), tying survival of the host organism (E. coli) to the success of REDRAW editing.

TABLE 3
Targets for bacterial REDRAW editing

| | Location of | | Successful Editing |
|---|---|---|---|
| Target | Target | Desired Edit | Result |
| gyrA | Genome | Ser83 > Leu | Resistance to |
| | | TCG > TTG | Nalidixic Acid |
| rpsL | Genome | Lys44 > Arg | Resistance to |
| | | AAA > CGT | Streptomycin |
| aadA | Plasmid | Stop61 > Thr | Resistance to |
| | | TGA > ACG | Streptomycin |
| aadA | Plasmid | Stop115 > Leu | Resistance to |
| | | TGA > CTG | Streptomycin |
| aadA | Plasmid | Stop32 > Asp | Resistance to |
| | | TGA > GAT | Streptomycin |

REDRAW tagRNA Experiments—Bacterial Screen

[0291] The host organism for all bacterial REDRAW tagRNA screening experiments was E. coli BL21(DE3). Prior to performing the selection experiments, each REDRAW expression construct was transformed into chemically competent BL21(DE3) according to manufacturer's instructions and plated onto LB agar plates with Kanamycin. Single colonies were then picked from the transformation plates, and batches of electrocompetent cells were made following a previously developed method (Sambrook and Russell (Transformation of E. coli by electroporation. Cold Spring Harbor Protocols 2006.1 (2006): pdb-prot3933). Competent cells harboring each REDRAW expression construct were then electroporated with 10 ng of each reporter plasmid, recovered for 1 hour in SOC at 37C, 225 rpm, and plated onto LB agar plates with kanamycin and chloramphenicol. Single colonies from these plates were then picked from the transformation plates, and batches of electrocompetent cells were made again (Sambrook and Russell (Transformation of E. coli by electroporation. Cold Spring Harbor Protocols 2006.1 (2006): pdb-prot3933). Table 4 below summarizes the batches of electrocompetent cells made for the first tagRNA library testing.

TABLE 1
Electrocompetent Cells prepared for tagRNA Library 1 Selection Experiments

| Competent | | |
|---|---|---|
| Cell Batch | Constructs Harbored in BL21(DE3) | SEQ ID NO |
| 1 | SV40-MMLV-RT-XTEN-nRRLbCas12a-SV40 | 63 |
| 2 | SV40-MMLV-RT-5R-nRRLbCas12a-SV40 | 64 |
| 3 | SV40-nRRLbCas12a-XTEN-MMLV-RT-SV40 | 65 |
| 4 | SV40-nRRLbCas12a-5R-MMLV-RT-SV40 | 66 |
| 5 | SV40-MMLV-RT-XTEN-nRVRLbCas12a-SV40 | 67 |
| 6 | SV40-MMLV-RT-5R-nRVRLbCas12a-SV40 | 68 |
| 7 | SV40-nRVRLbCas12a-XTEN-MMLV-RT-SV40 | 69 |
| 8 | SV40-nRVRLbCas12a-5R-MMLV-RT-SV40 | 70 |
| 9 | SV40-MMLV-RT-XTEN-nLbCas12a-SV40 + aadA Thr61 | 71 + Thr61 |
| 10 | SV40-MMLV-RT-XTEN-nLbCas12a-SV40 + aadA Leu115 | 71 + Leu115 |
| 11 | SV40-MMLV-RT-XTEN-nLbCas12a-SV40 + Asp132 | 71 + Asp132 |
| 12 | SV40-MMLV-RT-5R-nLbCas12a-SV40 + Thr61 | 72 + Thr61 |
| 13 | SV40-MMLV-RT-5R-nLbCas12a-SV40 + Leu115 | 72 + Leu115 |
| 14 | SV40-MMLV-RT-5R-nLbCas12a-SV40 + Asp132 | 72 + Asp132 |
| 15 | SV40-nLbCas12a-XTEN-MMLV-RT-SV40 + Thr61 | 73 + Thr61 |
| 16 | SV40-nLbCas12a-XTEN-MMLV-RT-SV40 + Leu115 | 73 + Leu115 |
| 17 | SV40-nLbCas12a-XTEN-MMLV-RT-SV40 + Asp132 | 73 + Asp132 |
| 18 | SV40-nLbCas12a-5R-MMLV-RT-SV40 + Thr61 | 74 + Thr61 |
| 19 | SV40-nLbCas12a-5R-MMLV-RT-SV40 + Leu115 | 74 + Leu115 |
| 20 | SV40-nLbCas12a-5R-MMLV-RT-SV40 + Asp132 | 74 + Asp132 |

SV40 = NLS,
MMLV-RT = reverse transcriptase,
XTEN = linker,
nLbCas12a = nickase Cas12

[0292] Selection experiments were performed by first electroporating 100 ng of tagRNA library into 50 uL of each batch of electrocompetent cells. Transformations were recovered for 1 hour at 37° C. with 225 rpm shaking. After 1 hour of recovery, 1 uL of recovery was removed, mixed with 99 uL of LB, and plated onto LB agar plates with appropriate antibiotics to check for transformation efficiency. The remaining amount of each transformation was then added to 29 mL of LB+Antibiotics (LB Kan/Carb for genomic selections, and LB Kan/Carb/Cam for plasmid selections) and 0.5 mM IPTG. The expression cultures were grown at 37° C., with 225 rpm shaking overnight.

[0293] The following day, the OD600 of each expression culture was measured. For each expression culture, 1 OD was plated onto 5 plates (about 0.2 OD per plate) containing antibiotics for the REDRAW expression vector (Kan), the tagRNA plasmid (Carb), the reporter plasmid, 0.5 mM IPTG, and an additional selection antibiotic (nalidixic acid or streptomycin). Plates were incubated overnight at 37° C., and growth was observed the following morning. If no colonies were observed, the plates were incubated an additional 24 hours at 37° C.

[0294] Colonies that were observed on the selection plates were picked, re-streaked onto plates with appropriate antibiotics, and then subjected to colony PCR to amplify the gene targeting for editing and the tagRNA for Sanger sequencing. Sanger sequencing was performed on the colony PCR products by Genewiz.

[0295] Evaluation of the second library was performed the same way as the first tagRNA library, with one modification. Instead of preparing 20 batches of electrocompetent cells, one large batch of electrocompetent BL21(DE3) harboring the second tagRNA library was prepared. The REDRAW expression constructs (100 ng) or the REDRAW expression constructs+reporter plasmids (100 ng each) were then transformed into electrocompetent cells harboring the tagRNA library. All subsequent steps were repeated in the same manner.

Evaluation of REDRAW Editing with the First tagRNA Library-Bacterial Screen

[0296] The number of colonies obtained from the selection experiments for the first tagRNA library are summarized in Table 5 below. No colonies were observed for either of the genomic selections (selections 1-8). For each of the plasmid selections, colonies were observed.

TABLE 5
First tagRNA library selection experiment results.

| | | | Colonies |
|---|---|---|---|
| | | | on |
| Selection | | | Selection |
| Number | REDRAW Editor | Target | Plates |
| 1 | SV40-MMLV-RT-XTEN-nRRLbCas12a-SV40 | gyrA (genome) | 0 |
| | (SEQ ID NO: 63) | | |
| 2 | SV40-MMLV-RT-5R-nRRLbCas12a-SV40 | gyrA (genome) | 0 |
| | (SEQ ID NO: 64) | | |
| 3 | SV40-nRRLbCas12a-XTEN-MMLV-RT-SV40 | gyrA (genome) | 0 |
| | (SEQ ID NO: 65) | | |
| 4 | SV40-nRRLbCas12a-5R-MMLV-RT-SV40 | gyrA (genome) | 0 |
| | (SEQ ID NO: 66) | | |
| 5 | SV40-MMLV-RT-XTEN-nRVRLbCas12a-SV40 | rpsL (genome) | 0 |
| | (SEQ ID NO: 67) | | |
| 6 | SV40-MMLV-RT-5R-nRVRLbCas12a-SV40 | rpsL (genome) | 0 |
| | (SEQ ID NO: 68) | | |
| 7 | SV40-nRVRLbCas12a-XTEN-MMLV-RT-SV40 | rpsL (genome) | 0 |
| | (SEQ ID NO: 69) | | |
| 8 | SV40-nRVRLbCas12a-5R-MMLV-RT-SV40 | rpsL (genome) | 0 |
| | (SEQ ID NO: 70) | | |
| 9 | SV40-MMLV-RT-XTEN-nLbCas12a-SV40 | aadA Thr61 | Lawn |
| | (SEQ ID NO: 71) | (plasmid) | |
| 10 | SV40-MMLV-RT-XTEN-nLbCas12a-SV40 | aadA Leu115 | 11 |
| | (SEQ ID NO: 71) | (plasmid) | |
| 11 | SV40-MMLV-RT-XTEN-nLbCas12a-SV40 | aadA Asp132 | 9 |
| | (SEQ ID NO: 71) | (plasmid) | |
| 12 | SV40-MMLV-RT-5R-nLbCas12a-SV40 | aadA Thr61 | Lawn |
| | (SEQ ID NO: 72) | (plasmid) | |
| 13 | SV40-MMLV-RT-5R-nLbCas12a-SV40 | aadA Leu115 | 10 |
| | (SEQ ID NO: 72) | (plasmid) | |
| 14 | SV40-MMLV-RT-5R-nLbCas12a-SV40 | aadA Asp132 | 9 |
| | (SEQ ID NO: 72) | (plasmid) | |
| 15 | SV40-nLbCas12a-XTEN-MMLV-RT-SV40 | aadA Thr61 | Lawn |
| | (SEQ ID NO: 73) | (plasmid) | |
| 16 | SV40-nLbCas12a-XTEN-MMLV-RT-SV40 | aadA Leu115 | 1 |
| | (SEQ ID NO: 73) | (plasmid) | |
| 17 | SV40-nLbCas12a-XTEN-MMLV-RT-SV40 | aadA Aspl32 | 1 |
| | (SEQ ID NO: 73) | (plasmid) | |
| 18 | SV40-nLbCas12a-5R-MMLV-RT-SV40 | aadA Thr61 | Lawn |
| | (SEQ ID NO: 74) | (plasmid) | |
| 19 | SV40-nLbCas12a-5R-MMLV-RT-SV40 | aadA Leu115 | 2 |
| | (SEQ ID NO: 74) | (plasmid) | |
| 20 | SV40-nLbCas12a-5R-MMLV-RT-SV40 | aadA Aspl 32 | 0 |
| | (SEQ ID NO: 74) | (plasmid) | |

[0297] For selections 9, 12, 15 and 18 (aadA Thr61 target), lawns of bacteria were observed. Isolated colonies from these plates were false positives. For selections 10, 11, 13, 14, 16, and 17 (aadA Leu115 target and aadA Asp132 target), low numbers of colonies were observed on the plates. Colonies on these plates had both the tagRNA and the target amplified by colony PCR and were sent for Sanger sequencing to confirm the edit made and to identify the tagRNA responsible for the edit. All colonies evaluated from selections 11, 14, 17 and 20 (aadA Asp132 target) were false positives. Multiple colonies from selection 10 (aadA Leu115 target) had the designed edit and an associated tagRNA. The sequencing result of the edited target is shown in FIG. 8, demonstrating a TGA→CTG edit in a defunct aadA gene, restoring antibiotic resistance.

[0298] The identified sequence of the tagRNA responsible for the edit is associated with the edit shown in FIG. 8:

(SEQ ID NO: 87)
5′-GTTTCAAAGATTAAATAATTTCTACTAAGTGTAGATTACGGCTC
CGCAGTGGATGGCGGTAATTTCTACTAAGTGTAGATGCGGCGCGTTGTT
TCATCAAGGCGTACGGTCACCGTAACCAGCAAATCAATATCACTGTGTG
GCTTCAGGCCGCCATCCACTGCGG-3′

[0299] The protein configuration from selection 10 is the following: SV40-nCas12a-XTEN-MMLV-RT-SV40.

Evaluation of REDRAW Editing with the Second tagRNA Library—Genomic Selection Results

[0300] The number of colonies obtained from the genomic selection experiments for the second tagRNA library are summarized in Table 6 below. Colonies were observed on the rpsL selection plates.

TABLE 6
Second tagRNA library experimental results - colonies on selection plates for the
genomic selections

| | | | Colonies |
|---|---|---|---|
| | | | on |
| Selection | | | Selection |
| Number | REDRAW Editor | Target | Plates |
| 2.1 | SV40-MMLV-RT-XTEN-nRRLbCas12a(H759A)-SV40 | gyrA (genome) | 0 |
| | (SEQ ID NO: 75) | | |
| 2.2 | SV40-MMLV-RT-5R-nRRLbCas12a(H759A)-SV40 | gyrA (genome) | 0 |
| | (SEQ ID NO: 76) | | |
| 2.3 | SV40-nRRLbCas12a(H759A)-XTEN-MMLV-RT-SV40 | gyrA (genome) | 0 |
| | (SEQ ID NO: 77) | | |
| 2.4 | SV40-nRRLbCas12a(H759A)-5R-MMLV-RT-SV40 | gyrA (genome) | 0 |
| | (SEQ ID NO: 78) | | |
| 2.5 | SV40-MMLV-RT-XTEN-nRVRLbCas12a(H759A)-SV40 | rpsL(genome) | 5 |
| | (SEQ ID NO: 79) | | |
| 2.6 | SV40-MMLV-RT-5R-nRVRLbCas12a(H759A)-SV40 | rpsL (genome) | 8 |
| | (SEQ ID NO: 80) | | |
| 2.7 | SV40-nRVRLbCas12a(H759A)-XTEN-MMLV-RT-SV40 | rpsL (genome) | 2 |
| | (SEQ ID NO: 81) | | |
| 2.8 | SV40-nRVRLbCas12a(H759A)-5R-MMLV-RT-SV40 | rpsL (genome) | 11 |
| | (SEQ ID NO: 82) | | |
| 2.9 | SV40-MMLV-RT-XTEN-nRRLbCas12a-SV40 | gyrA (genome) | 0 |
| | (SEQ ID NO: 63) | | |
| 2.10 | SV40-MMLV-RT-5R-nRRLbCas12a-SV40 | gyrA (genome) | 0 |
| | (SEQ ID NO: 64) | | |
| 2.11 | SV40-nRRLbCas12a-XTEN-MMLV-RT-SV40 | gyrA (genome) | 0 |
| | (SEQ ID NO: 65) | | |
| 2.12 | SV40-nRRLbCas12a-5R-MMLV-RT-SV40 | gyrA (genome) | 0 |
| | (SEQ ID NO: 66) | | |
| 2.13 | SV40-MMLV-RT-XTEN-nRVRLbCas12a-SV40 | rpsL (genome) | 3 |
| | (SEQ ID NO: 67) | | |
| 2.14 | SV40-MMLV-RT-5R-nRVRLbCas12a-SV40 | rpsL (genome) | 0 |
| | (SEQ ID NO: 68) | | |
| 2.15 | SV40-nRVRLbCas12a-XTEN-MMLV-RT-SV40 | rpsL (genome) | 0 |
| | (SEQ ID NO: 69) | | |
| 2.16 | SV40-nRVRLbCas12a-5R-MMLV-RT-SV40 | rpsL (genome) | 1 |
| | (SEQ ID NO: 70) | | |

[0301] For selections 2.1-2.4 and 2.9-2.12 (gyrA genomic target), no colonies were observed on the plates. For selections 2.5-2.8 and 2.13-2.16 (rpsL genomic target), low numbers of colonies were observed on these plates. Colonies on these plates were re-streaked to verify resistance to all antibiotics. Colonies from these plates were then used to generate PCR products of the tagRNA and the target for Sanger sequencing. Sanger sequencing was used to confirm the edit made and to identify the tagRNA responsible for the edit. All colonies from selections 2.6-2.8 and 2.13-2.16 were false positives. One colony from selection 2.5 had the designed edit AAA to CGT, which confers Streptomycin resistance (see FIG. 9).

[0302] The identified sequence of the tagRNA associated with the edit shown in FIG. 9 is:

SEQ ID NO: 92
5′-TATTTCTATAAGTGTAGATTACTCGTGTATATATACTCCGCACCGA
GGTTGGTACGAACACCGGGAGTCTTTAACACGACCGCCACGGATCAGGA
TCACGGAGTGCTCCTGCAGGTTGTGACCTTCACCACCGATGTAGGAAGT
CACTTCGAAACCGTTAGTCAGACGAACACGGCATACTTTACGCAGCGCG
GAGTTCGGTTTACGAGGAGIGGTAGTATATACACGAGT-3′.

[0303] The protein configuration from selection 2.5 is the following: SV40-MMLV-RT-XTEN-nRVRLbCas12a(H759A)-SV40.

Evaluation of REDRAW Editing with the Second tagRNA Library—Plasmid Selection Results

[0304] The number of colonies obtained from the plasmid selection experiments for the second tagRNA library are summarized in Table 7 below.

TABLE 7

| | | | Colonies |
|---|---|---|---|
| | | | on |
| Selection | | | Selection |
| Number | REDRAW Editor | Target | Plates |
| 2.17 | SV40-MMLV-RT-XTEN-nLbCas12a-SV40 | aadA Th r61 | 0 |
| | (SEQ ID NO: 71) | (plasmid) | |
| 2.18 | SV40-MMLV-RT-XTEN-nLbCas12a-SV40 | aadA Leu115 | 4 |
| | (SEQ ID NO: 71) | (plasmid) | |
| 2.19 | SV40-MMLV-RT-XTEN-nLbCas12a-SV40 | aadA Asp132 | 2 |
| | (SEQ ID NO: 71) | (plasmid) | |
| 2.20 | SV40-MMLV-RT-5R-nLbCas12a-SV40 | aadA Thr61 | 0 |
| | (SEQ ID NO: 72) | (plasmid) | |
| 2.21 | SV40-MMLV-RT-5R-nLbCas12a-SV40 | aadA Leu115 | 0 |
| | (SEQ ID NO: 72) | (plasmid) | |
| 2.22 | SV40-MMLV-RT-5R-nLbCas12a-SV40 | aadA Asp132 | 1 |
| | (SEQ ID NO: 72) | (plasmid) | |
| 2.23 | SV40-nLbCas12a-XTEN-MMLV-RT-SV40 | aadA Thr61 | 0 |
| | (SEQ ID NO: 73) | (plasmid) | |
| 2.24 | SV40-nLbCas12a-XTEN-MMLV-RT-SV40 | aadA Leu115 | 0 |
| | (SEQ ID NO: 73) | (plasmid) | |
| 2.25 | SV40-nLbCas12a-XTEN-MMLV-RT-SV40 | aadA Asp132 | 9 |
| | (SEQ ID NO: 73) | (plasmid) | |
| 2.26 | SV40-nLbCas12a-5R-MMLV-RT-SV40 | aadA Thr61 | 0 |
| | (SEQ ID NO: 74) | (plasmid) | |
| 2.27 | SV40-nLbCas12a-5R-MMLV-RT-SV40 | aadA Leu115 | 0 |
| | (SEQ ID NO: 74) | (plasmid) | |
| 2.28 | SV40-nLbCas12a-5R-MMLV-RT-SV40 | aadA Asp132 | 2 |
| | (SEQ ID NO: 74) | (plasmid) | |
| 2.29 | SV40-MMLV-RT-XTEN-nLbCas12a(H759A)- | aadA Thr61 | 0 |
| | SV40 | (plasmid) | |
| | (SEQ ID NO: 83) | | |
| 2.30 | SV40-MMLV-RT-XTEN-nLbCas12a(H759A)- | aadA Leu115 | 0 |
| | SV40 | (plasmid) | |
| | (SEQ ID NO: 83) | | |
| 2.31 | SV40-MMLV-RT-XTEN-nLbCas12a(H759A)- | aadA Asp132 | 12 |
| | SV40 | (plasmid) | |
| | (SEQ ID NO: 83) | | |
| 2.32 | SV40-MMLV-RT-5R-nLbCas12a(H759A)-SV40 | aadA Thr61 | 0 |
| | (SEQ ID NO: 84) | (plasmid) | |
| 2.33 | SV40-MMLV-RT-5R-nLbCas12a(H759A)-SV40 | aadA Leu115 | 0 |
| | (SEQ ID NO: 84) | (plasmid) | |
| 2.34 | SV40-MMLV-RT-5R-nLbCas12a(H759A)-SV40 | aadA Asp132 | 0 |
| | (SEQ ID NO: 84) | (plasmid) | |
| 2.35 | SV40-nLbCas12a(H759A)-XTEN-MMLV-RT- | aadA Thr61 | 0 |
| | SV40 | (plasmid) | |
| | (SEQ ID NO: 85) | | |
| 2.36 | SV40-nLbCas12a(H759A)-XTEN-MMLV-RT- | aadA Leu115 | 0 |
| | SV40 | (plasmid) | |
| | (SEQ ID NO: 85) | | |
| 2.37 | SV40-nLbCas12a(H759A)-XTEN-MMLV-RT- | aadA Asp132 | 0 |
| | SV40 | (plasmid) | |
| | (SEQ ID NO: 85) | | |
| 2.38 | SV40-nLbCas12a(H759A)-5R-MMLV-RT-SV40 | aadA Thr61 | 0 |
| | (SEQ ID NO: 85) | (plasmid) | |
| 2.39 | SV40-nLbCas12a(H759A)-5R-MMLV-RT-SV40 | aadA Leu115 | 1 |
| | (SEQ ID NO: 86) | (plasmid) | |
| 2.40 | SV40-nLbCas12a(H759A)-5R-MMLV-RT-SV40 | aadA Asp132 | 2 |
| | (SEQ ID NO: 86) | (plasmid) | |

[0305] Colonies were observed on plates for the Leu115 and Asp132 selections. Selections 2.18, 2.19, 2.22, 2.25, 2.28, 2.31, 2.39, and 2.40 had colonies on the selection plates. These colonies were re-streaked to verify resistance to all antibiotics. They were then used to generate PCR products of the tagRNA and the target for Sanger sequencing. Sanger sequencing was used to confirm the edit made and to identify the tagRNA responsible for the edit. All colonies from selections 2.18, 2.19, 2.22, 2.28, 2.39, and 2.40 were false positives. Four colonies from selection 2.25 and two colonies from selection 2.31 had the designed edit and an associated tagRNA as shown in FIG. 10 and FIG. 11. The four colonies from selection 2.25 had identical edits and tagRNAs. The two colonies from selection 2.31 also had identical edits and tagRNAs.

[0306] The identified sequence of the tagRNA associated with the edit in FIG. 10 from selection 2.25 is:

SEQ ID NO: 93
5′-TAATTTCTACTAAGTGTAGATTACGGCTCCGCAGTGGATGGCGGTA
AGTCTCCATAGAATGGAGGACAGCGCGGAGAATCTCGCTCTCTCCAGGG
GAAGCCGAAGTTTCCAAAAGGTCGTTGATCAAAGCGCGGCGCGTTGTTT
CATCAAGGCGTACGGTCACCGTAACCAGCAAATCAATATCACTGTGTGG
CTTCAGGCCGCCATCCACTGCGGAT-3′.

[0307] The protein configuration from selection 2.25 is the following: SV40-nCas12a-XTEN-MMLV-RT-SV40.

[0308] The identified sequence of the tagRNA associated with the edit in FIG. 11 from selection 2.31 is:

SEQ ID NO: 94
5′-TAATTTCAACTAAGTGTAGATTACGGCTCCGCAGTGGATGGCGGTA
AGTCTCCATAGAATGGAGGGCGGAGAATCTCGCTCTCTCCAGGGGAAGC
CGAAGTTTCCAAAAGGTCGTTGATCAAAGCGCGGCGCGTTGTTTCATCA
AGGCGTACGGTCACCGTAACCAGCAAATCAATATCACTGTGTGGCTTCA
GGCCGCCATCCACTGCGGAT-3′.

[0309] The protein configuration from selection 2.31 is the following: SV40-MMLV-RT-XTEN-nLbCas12a(H759)-SV40.

### Summary of Observed REDRAW Editing in Bacterial Cells

[0310] Table 8 below provides a summary of the observed instances of REDRAW editing in E. coli. Described for each example is the protein configuration (REDRAW Editor), the target that was edited, the location of the tagRNA extension (5′ or 3′ of the Cas12a hairpin and guide), the PBS length, and the RTT length.

TABLE 8
Summary of REDRAW editing observed in E. coli.

| | | | | PBS | |
|---|---|---|---|---|---|
| | | | | length | |
| Selection | REDRAW Editor | Target | Extension | (bp) | RTT length |
| 10 | SV40-MMLV-RT-XTEN- | aadA Leu115 | 3′ | 17 | 96 bp |
| | nLbCas12a-SV40 | (plasmid) | | | |
| | (SEQ ID NO: 71) | | | | |
| 2.5 | SV40-MMLV-RT-XTEN- | rpsL | 3′ | 17 | 175 bp |
| | nRVRLbCas12a(H759A)- | (genomic) | | | |
| | SV40 | | | | |
| | (SEQ ID NO: 79) | | | | |
| 2.25 | SV40-nLbCas12a-XTEN- | aadA Asp132 | 3′ | 12 | 140 bp plus 21 |
| | MMLV-RT-SV40 | (plasmid) | | | bp decoy |
| | (SEQ ID NO: 73) | | | | hairpin* |
| 2.31 | SV40-MMLV-RT-XTEN- | aadA asp132 | 3′ | 12 | 140 bp plus 21 |
| | nLbCas12a(H759A)-SV40 | (plasmid) | | | bp decoy |
| | (SEQ ID NO: 83) | | | | hairpin* |

*Decoy hairpin sequence: TAAGTCTCCATAGAATGGAGG SEQ ID NO: 95.

### Example 2. Precise Editing Activity in Human Cells

[0311] A further approach that uses the active form of Cas12a in conjunction with reverse transcriptase is shown FIG. 12. and outlined below.
[0312] Nuclease active Cas12a is recruited to the site via spacer—target site interaction.
[0313] Cas12a makes a double stranded break. Optionally, a 5′ to 3′ exonuclease is provided to degrade the non-template strand.
[0314] Priming occurs using the tagRNA. The primer binding site (PBS) encodes the sequences to the right of the cleavage site, complementary to the template strand DNA.
[0315] Reverse transcriptase (MMuLV-RT (5M)) extends from the priming site or primer on the target nucleic (dashed line=the extension), encoding the desired change within the newly synthesized strand.
[0316] Resolution of DNA intermediates via mismatch repair and DNA ligation generates an edited, new DNA strand.

### Methods:

[0317] Extended guide RNAs were designed to target two genomic sites in HEK293T cells, DMNT1 and FANCF1. Varying combinations of primer binding sites (PBS) and reverse transcriptase template (RTT) lengths were assayed. The guide RNAs encoded a two base change in the PAM region of the target guides, corresponding to TT to AA at the −2 and −3 position (counting TTTV PAM as −4 to −1 position). The guide extensions were fused to either the 5′ or the 3′ end of the guide RNA.

[0318] Plasmids encoding an RNAse-dead mutant LbCas12a (H758A), reverse transcriptase (MMuLV-RT(5M)), and optionally an exonuclease (one of T5_Exonuclease, T7_Exonuclease, RecE, and RecJ), and an extended guide RNA were transfected into HEK293T cells grown at 70% confluency using Lipofectamine™ 3000 according to manufacturer's protocol. Cells were harvested after 3 days and gene editing was quantified by next generation sequencing.

### Results:

[0319] We observed intended precise editing for both sites targeted. Depending on the guide design, we observed up to 0.5% editing at the FANCF1 site (FIG. 13) and up to 1.7% at the DMNT1 site (FIG. 14). Use of exonuclease improved editing efficiency in some guide designs.

TABLE 9
Guide design used to target the FANCF1 site (FIG. 13).
FANCF1

| | | RTT | PBS | |
|---|---|---|---|---|
| | 3′ or | length | length | Precise |
| pWISE | 5′ | (bases) | (bases) | Editing |
| pWISE878 | N/A | 0 | 0 | 0 |
| pWISE2928 | 3′ | 74 | 48 | 0.17289 |
| pWISE2929 | 3′ | 52 | 48 | 0.54658 |
| pWISE2930 | 3′ | 44 | 48 | 0.10525 |
| pWISE2931 | 3′ | 36 | 48 | 0 |
| pWISE2932 | 3′ | 74 | 24 | 0.28148 |
| pWISE2934 | 3′ | 44 | 24 | 0 |
| pWISE2935 | 3′ | 36 | 24 | 0 |
| PWISE2936 | 3′ | 74 | 16 | 0 |
| PWISE2937 | 3′ | 52 | 16 | 0.20349 |
| pWISE2938 | 3′ | 44 | 16 | 0.12821 |
| pWISE2940 | 3′ | 74 | 8 | 0 |
| pWISE2941 | 3′ | 52 | 8 | 0 |
| pWISE2942 | 3′ | 44 | 8 | 0 |
| pWISE2943 | 3′ | 36 | 8 | 0 |
| pWISE2945 | 5′ | 52 | 48 | 0 |
| PWISE2946 | 5′ | 44 | 48 | 0 |
| pWISE2947 | 5′ | 36 | 48 | 0.10335 |
| pWISE2948 | 5′ | 74 | 24 | 0 |
| pWISE2949 | 5′ | 52 | 24 | 0 |
| PWISE2950 | 5′ | 44 | 24 | 0 |
| pWISE2951 | 5′ | 36 | 24 | 0 |

TABLE 10
Guide design used to target the DMNT1 site (FIG. 14).
DMNT1

| | | RTT | PBS | % |
|---|---|---|---|---|
| | 3′ or | length | length | Precise |
| pWISE | 5′ | (bases) | (bases) | Editing |
| pWISE258 | N/A | 0 | 0 | 0 |
| pWISE2960 | 3′ | 74 | 48 | 0.77529 |
| pWISE2961 | 3′ | 52 | 48 | 0.3139 |
| pWISE2963 | 3′ | 36 | 48 | 1.17854 |
| pWISE2966 | 3′ | 44 | 24 | 0.30752 |
| pWISE2967 | 3′ | 36 | 24 | 0.71539 |
| pWISE2971 | 3′ | 36 | 16 | 0.96806 |
| pWISE2973 | 3′ | 52 | 8 | 0.23422 |
| pWISE2975 | 3′ | 36 | 8 | 0.53485 |
| pWISE2976 | 5′ | 74 | 48 | 0.33196 |
| pWISE2977 | 5′ | 52 | 48 | 0.77164 |
| pWISE297S | 5′ | 44 | 48 | 1.17289 |
| pWISE2979 | 5′ | 36 | 48 | 1.72435 |
| pWISE2980 | 5′ | 74 | 24 | 0.3538 |
| pWISE2981 | 5′ | 52 | 24 | 0.44055 |
| pWISE2982 | 5′ | 44 | 24 | 0.55662 |
| pWISE2983 | 5′ | 36 | 24 | 1.55194 |

TABLE 11
Example extended guide nucleic acids (tagRNAs)

| | | | | | Intended |
|---|---|---|---|---|---|
| | | | | | Precise Edit |
| | | | | | (PAM is |
| | | | | | denoted as |
| | Name/SEQ | Cas12a | | | position −4, −3, |
| pWISE | ID NO | species | Spacer | tagRNA extension sequence | −2, −1) |
| pWISE | tagRNA 1 | LbCas12a | CCTCACTC | ACAGCAGGCCTTTGGTCAGGTTGGC | TT to AA at |
| 2960 | 173 | | CTGCTCG | TGCTGGGCTGGCCCTGGGGCCGTA | position (−3, −2) |
| | | | GTGAATTT | ACCCTCACTCCTGCTCGGTGAATTT | |
| | | | | GGCTCAGCAGGCACCTGCCTCAGCT | |
| | | | | GCTCACTTGAGCCTCTGGGTCTA | |
| pWISE | tagRNA 2 | LbCas12a | CCTCACTC | GGCTGCTGGGCTGGCCCTGGGGCC | TT to AA at |
| 2961 | 174 | | CTGCTCG | GTAACCCTCACTCCTGCTCGGTGAA | position (−3, −2) |
| | | | GTGAATTT | TTTGGCTCAGCAGGCACCTGCCTCA | |
| | | | | GCTGCTCACTTGAGCCTCTGGGTCT | |
| | | | | A | |
| pWISE | tagRNA 3 | LbCas12a | CCTCACTC | GGCTGGCCCTGGGGCCGTAACCCTC | TT to AA at |
| 2962 | 175 | | CTGCTCG | ACTCCTGCTCGGTGAATTTGGCTCA | position (−3, −2) |
| | | | GTGAATTT | GCAGGCACCTGCCTCAGCTGCTCAC | |
| | | | | TTGAGCCTCTGGGTCTA | |
| pWISE | tagRNA 4 | LbCas12a | CCTCACTC | CTGGGGCCGTAACCCTCACTCCTGC | TT to AA at |
| 2963 | 176 | | CTGCTCG | TCGGTGAATTTGGCTCAGCAGGCAC | position (−3, −2) |
| | | | GTGAATTT | CTGCCTCAGCTGCTCACTTGAGCCT | |
| | | | | CTGGGTCTA | |
| pWISE | tagRNA 5 | LbCas12a | CCTCACTC | ACAGCAGGCCTTTGGTCAGGTTGGC | CT to GA at |
| 4673 | 177 | | CTGCTCG | TGCTGGGCTGGCCCTGGGGCCGTTT | position (12, |
| | | | GTGAATTT | CCCTCACTCCTGGACGGTGAATTTG | 13) |
| | | | | GCTCAGCAGGCACCTGCCTCAGCTG | |
| | | | | CTCACTTGAGCCTCTGGGTCTA | |
| pWISE | tagRNA 6 | LbCas12a | CCTCACTC | ACAGCAGGCCTTTGGTCAGGTTGGC | CG to GC at |
| 4674 | 178 | | CTGCTCG | TGCTGGGCTGGCCCTGGGGCCGTTT | position (14, |
| | | | GTGAATTT | CCCTCACTCCTGCTGCGTGAATTTG | 15) |
| | | | | GCTCAGCAGGCACCTGCCTCAGCTG | |
| | | | | CTCACTTGAGCCTCTGGGTCTA | |
| pWISE | tagRNA 7 | LbCas12a | GCGGATG | AATAGCATTGCAGAGAGGCGTATC | CC to GG at |
| 4735 | 179 | | TTCCAATC | ATTTCGCGGATGTTGGAATCAGTAC | position (10, |
| | | | AGTACGC | GCAGAGAGTCGCCGTCTCCAAGGT | 11) |
| | | | A | GAAAGCGGAAGTAGGGCCTTCGCG | |
| | | | | CAC | |
| pWISE | tagRNA 8 | LbCas12a | GCGGATG | AATAGCATTGCAGAGAGGCGTATC | AA to TT at |
| 4736 | 180 | | TTCCAATC | ATTTCGCGGATGTTCCTTTCAGTAC | position (12, |
| | | | AGTACGC | GCAGAGAGTCGCCGTCTCCAAGGT | 13) |
| | | | A | GAAAGCGGAAGTAGGGCCTTCGCG | |
| | | | | CAC | |
| pWISE | tagRNA 9 | AsCas12a | CCTCACTC | ACAGCAGGCCTTTGGTCAGGTTGGC | TT to AA at |
| 4906 | 181 | | CTGCTCG | TGCTGGGCTGGCCCTGGGGCCGTA | position (−3, −2) |
| | | | GTGAATTT | ACCCTCACTCCTGCTCGGTGAATTT | |
| | | | | GGCTCAGCAGGCACCTGCCTCAGCT | |
| | | | | GCTCACTTGAGCCTCTGGGTCTA | |
| pWISE | tagRNA 10 | AsCas12a | CCTCACTC | GGCTGCTGGGCTGGCCCTGGGGCC | TT to AA at |
| 4907 | 182 | | CTGCTCG | GTAACCCTCACTCCTGCTCGGTGAA | position (−3, −2) |
| | | | GTGAATTT | TTTGGCTCAGCAGGCACCTGCCTCA | |
| | | | | GCTGCTCACTTGAGCCTCTGGGTCT | |
| | | | | A | |
| pWISE | tagRNA 11 | AsCas12a | CCTCACTC | GGCTGGCCCTGGGGCCGTAACCCTC | TT to AA at |
| 4908 | 183 | | CTGCTCG | ACTCCTGCTCGGTGAATTTGGCTCA | position (−3, −2) |
| | | | GTGAATTT | GCAGGCACCTGCCTCAGCTGCTCAC | |
| | | | | TTGAGCCTCTGGGTCTA | |
| pWISE | tagRNA 12 | AsCas12a | CCTCACTC | CTGGGGCCGTAACCCTCACTCCTGC | TT to AA at |
| 4909 | 184 | | CTGCTCG | TCGGTGAATTTGGCTCAGCAGGCAC | position (−3, −2) |
| | | | GTGAATTT | CTGCCTCAGCTGCTCACTTGAGCCT | |
| | | | | CTGGGTCTA | |
| pWISE | tagRNA 13 | LbCas12a | CTGATGG | GCACTCTGCCACTTATTGGGTCAGC | TT to AA at |
| 4438 | 185 | | TCCATGTC | TGTTAACATCAGTACGTTAATGTAA | position (−3, −2) |
| | | | TGTTACTC | CCTGATGGTCCATGTCTGTTACTCG | |
| | | | | CCTGTCAAGTGGCGTGACACCGGG | |
| | | | | CGTGTTCCCCAGAGTGACTTTTC | |
| pWISE | tagRNA 14 | LbCas12a | CTGATGG | AGCTGTTAACATCAGTACGTTAATG | TT to AA at |
| 4439 | 186 | | TCCATGTC | TAACCTGATGGTCCATGTCTGTTACT | position (−3, −2) |
| | | | TGTTACTC | CGCCTGTCAAGTGGCGTGACACCG | |
| | | | | GGCGTGTTCCCCAGAGTGACTTTTC | |

[0320] The effect of exonuclease transfection on precise editing activity at DMNT1 site is shown in FIG. 15 (normalized to no exonuclease treatment; pUC19=1). Exonuclease improves editing with some guide configurations.

### Example 3. Variations in REDRAW Protein Architecture

[0321] The methods of the present invention (i.e., REDRAW) were tested using different protein architectures/constructs for LbCas12a and RT(5M) including: (1) where the reverse transcriptase (RT(5M)) is provided by overexpressing the RT in the cell; (2) a construct in which SunTag (GCN4, e.g., SEQ ID NO:23, SEQ ID NO:24) is fused to the CRISPR-Cas effector protein (e.g., LbCpf1) and the RT (RT(5M)) is recruited to the site of editing by fusing it to an antibody (e.g., single chain variable fragment (scFv) antibody) that binds to the SunTag fused to the CRISPR-Cas effector protein; and (3) where the reverse transcriptase (RT(5M)) is fused to the N-terminus or C-terminus of the CRISPR-Cas effector protein (e.g., LbCpf1 (LbCas12a), e.g., LbCpf1 (H759A)) (e.g., RT(5M)-LbCpf1 (H759A) or LbCpf1 (H759A)-RT(5M))). The results are shown in FIG. 16. All constructs showed evidence of RT(5M) and tagRNA dependent REDRAW activity using four different tagRNA constructs. In this example, active recruitment with SunTag did not enhance activity. It may be that overexpression of non-tagged constructs allows sufficient level of protein concentration in the cell and therefore, under these conditions, this is not a rate-limiting aspect for generating a precise edit.

### MS2/MCP System

[0322] In addition to the architecture tested above, the MS2/MCP system was also evaluated for use with the constructs and methods of the invention. MS2 hairpin RNA structure binds to MCP protein. MS2 hairpin can be added to the tagRNA. In this example, a MS2 hairpin structure was added to the 3′ end of the tagRNA, and MCP was fused RT(5M) in order to recruit RT(5M) to the target site.

[0323] LbCas12a H759A with RT(5M) was transiently expressed without MCP (in trans control), or with MCP-RT(5M) (fusion construct). This architecture was tested using two tagRNAs, tagRNA5 and tagRNA6. We also compared the different tagRNA versions where tagRNA5 and tagRNA6 were modified with MS2 sequence at its 3′ end. The results are shown in FIG. 37. Comparing MCP-RT(5M) and RT(5M), the MS2 tagRNAs and MCP-RT(5M) did not result in an increase in precise editing efficiency. The MCP fusion may not be increasing precise editing efficiency under these experimental conditions because RT concentration is not rate limiting. However, an increase in editing efficiency was noted for the tagRNA having MS2 at its 3′ end. The MS2 structure at the 3′ end of the tagRNA may stabilize the tagRNA and reduce its degradation.

### Example 4. 5′-3′ Exonucleases for Use with Methods of the Invention (REDRAW)

[0324] 5′-3′ exonuclease may be useful with the methods of the invention by degrading the DNA at both ends of the double-stranded break. Thus, a 5′-3′ exonuclease may (1) allow a more robust RNA-DNA duplex formation (a substrate for RT-mediated polymerization) by degrading a strand that is normally base paired with the DNA strand that will be elongated and/or (2) allow the cell to favor the use of RT-synthesized DNA for use in DNA repair by degrading the region that will be overwritten by the RT. See, for example, the schematic in FIG. 17.

[0325] In this example, the exonucleases tested included are those listed in Table 11.

TABLE 12
5'-3' Exonucleases tested

| | | Source | SEQ ID |
|---|---|---|---|
| Name | Full name | species | NO |
| RecE | RecE | E. coli | 129 |
| RecJ | RecJ | E. coli | 130 |
| T5_Exo | Exonuclease from T5 Phage | T5 Phage | 131 |
| T7_Exo | Exonuclease from T7 Phage | T7 Phage | 132 |
| Lambda_Exo | Exonuclease from Lambda | Lambda phage | 133 |
| | Phage | | |
| sbcB | Exodeoxyribonuclease I | E. coli | 134 |
| hExo1 | Human exonuclease I | Human | 135 |

The 5′-3′ exonucleases were fused to the C-terminus of LbCas12a (H759A). Fusion constructs were transfected into HEK293T cells along with Reverse transcriptase (5M) construct and a plasmid expressing an appropriate tagRNA encoding a precise mutation. Cells were harvested 3 days post transfection and DNA was analyzed using High Throughput Sequencing (HTS). The results are shown in FIG. 18. Here, RT is expressed in trans (without recruitment), and the 5′-3′ exonucleases are fused to the C-terminus of LbCpf1 H759A. Compared to the construct in which exonuclease is not present (LbCpf1 H759A only), fusion of T7_Exo, in particular, improves REDRAW precise editing in three of the four tagRNAs tested.

[0326] FIG. 19 provides additional 5′-3′ exonuclease testing with the methods of the invention (REDRAW) and under the same conditions noted above. Specifically, FIG. 19 shows the percent precise editing with REDRAW using either the 5′-3′ exonuclease sbcB (SEQ ID NO:134) or the 5′-3′ exonuclease Exo (SEQ ID NO:135) each fused to the C-terminus of a Cas polypeptide (LbCpf1). RT(5M) (SEQ ID NO:97) is expressed in trans (no recruitment). In contrast to T7_Exo (SEQ ID NO:132), exonucleases sbcB and Exo did not improve REDRAW.

[0327] 5′-3′ exonucleases were also tested in trans with the methods of the invention. The results are provided in FIG. 20. The LbCpf1 and RT(5M) (SEQ ID NO:97) are provided as fusion proteins. The right side of FIG. 20 shows results with the RT fused to the N-terminus of the LbCpf1 (RT(5M)-LbCpf1 (H759A)) and the left side of the figure shows the results using an RT fused to the C-terminus of the LbCpf1 (LbCpf1 (H759A)-RT(5M)). FIG. 20 shows that when 5′-3′ exonucleases are expressed in trans, without being fused to LbCpf1, the editing rate does not increase compared to treatment without 5′-3′ exonucleases. Thus, a benefit from use of a 5′-3′ exonuclease with the methods of the invention is observed when the 5′-3′ exonucleases is fused to the CRISPR-Cas effector protein.

### Example 5. Mutations Modulating DNA Binding Affinity of Cas12a for Use with REDRAW

[0328] Lowering the DNA binding affinity of a CRISPR-Cas effector protein was envisioned to allow better dissociation of the CRISPR-Cas effector protein from the target site, thereby inducing a double-stranded DNA break. This may allow faster formation of intermediates that promote sequence replacement by RT and increase the efficiency of editing with the methods of the invention (REDRAW)

[0329] In this example, positively charged residues in Cas12a (LbCas12a) that interact with DNA backbone were mutated to alanine. Specifically, the following three mutations, K167A, K272A, K349A (with reference to the amino acid position numbering of SEQ ID NO:1 or SEQ ID NO:148), were cloned into LbCas12a H759A as single, double or triple mutants (K167A, K272A, K349A, K167A+K272A, K167A+K349A, K272A+K349A, and K167A+K272A+K349A). In this case, the H759A mutation (SEQ ID NO:148) was used to deactivate RNA processing ability of LbCas12a to facilitate 5′ tagRNA extensions to the crRNA.

[0330] LbCas12a containing the various combinations of binding affinity mutations were transfected into HEK293T cells along with plasmids encoding RT(5M) and a tagRNA encoding a precise edit. Cells were harvested three days post transfection and DNA was analyzed using High Throughput Sequencing (HTS). Certain mutation combinations were shown to improve the precise editing of the methods of the invention (FIG. 21).

### Example 6. Single-Stranded DNA Binding Proteins (ssDNA BP) for Use with REDRAW

[0331] Use of single-stranded DNA binding proteins (ssDNA BP) may potentially improve REDRAW by stabilizing the ssDNA that are generated during the reaction, by protecting DNA strands from degradation and make the same available for RT-mediated priming and polymerization. A selection of ssDNA BP were tested with the methods of the invention (see Table 12)

TABLE 13
Single-stranded DNA binding proteins evaluated

| Name | Source species | SEQ ID NO |
|---|---|---|
| hRad51(S208E_A209D) | human | 123 |
| hRad52 | human | 124 |
| BsRecA | Bacillus subtilis | 125 |
| EcRecA | E. coli | 126 |
| T4SSB | Escherichia phage P1 | 127 |
| Brex27 | Human | 128 |

The ssDNA BPs set forth in Table 12 were expressed in trans or as a fusion with Cas12a, also in the presence of RT(5M) (trans). The ssDNA BPs tested were hRad51_s208E A209D (SEQ ID NO:123), hRad52 (SEQ ID NO:124), BsRecA (SEQ ID NO:125), EcRecA (SEQ ID NO:126), T4SSB (SEQ ID NO:127) and Brex27 (SEQ ID NO:124). The results are shown in FIG. 22 and FIG. 23. Trans expression of the ssDNA BPs did not improve the percent of precise editing when compared to a control (pUC19) (see FIG. 22). The fusion proteins also failed to show an improvement, with the exception of the N-terminal and C-terminal fusion of Brex27 with Cas12 (see, FIG. 23). Brex27 is a peptide that is known to recruit Rad51 in situ and stabilize its interaction with ssDNA.

### Example 7. Evaluation of Gam Protein for Use in REDRAW

[0332] Gam protein may be helpful in reducing the formation of indels during REDRAW by preventing NHEJ. Gam binds to a double-stranded DNA break, preventing the DNA end from being processed. Gam may be used to reduce indel formation during cytosine base editing.

[0333] To evaluate the usefulness of Gam protein with the methods of the invention, Gam protein (Escherichia phage Mu Gam protein) (SEQ ID NO:147) was fused to either a CRISPR-Cas effector protein (LbCas12a H759A) (SEQ ID NO:148) or to RT(5M) (SEQ ID NO:53). Plasmids encoding LbCas12a H759A, RT(5M), and tagRNA encoding a precise mutation were transfected into HEK293T cells. Target DNA was analyzed after three days with high throughput sequencing. The results are shown in FIG. 24 and FIG. 25.

[0334] In FIG. 24, the reverse transcriptase (RT) is expressed in trans, either as a native sequence (e.g., RT(5M)) or fused at its N-terminus to the Gam protein (e.g., Gam-RT(5M)). These constructs are expressed concurrently with either LbCas12a (H759A) or with an LbCas12a (H759A) having a Gam protein fused to its N-terminus (e.g., Gam-LbCas12a H759A). In FIG. 25 the Gam protein is provided in trans, as a fusion protein with the reverse transcriptase (N-terminal fusion; Gam-RT(5M)) and/or as a fusion protein with the CRISPR-Cas effector polypeptide (e.g., Gam-LbCas12a H759A). The results show that in some cases Gam protein may be used to reduce indel formation but overall efficiency of editing using methods of the invention is not improved by inclusion of Gam protein.

### Example 8. Evaluation of Primer Binding Site (PBS) Length and Reverse Transcriptase Template (RTT) Length

[0335] The length of RTT and PBS in a tagRNA of the invention was varied to evaluate the effect of length on editing. LbCas12a, RT(5M), and tagRNAs having varying lengths of RTT and PBS were transfected into HEK293T cells and analyzed for editing rate three days post transfection using High Throughput Sequencing (HTS). The results are provided in FIG. 26. The top and bottom panels of FIG. 26 show the results using two different spacers (top panel: pwsp143 (GCTCAGCAGGCACCTGCCTCAGC) (SEQ ID NO:136), bottom panel: pwsp139 (CTGATGGTCCATGTCTGTTACTC) (SEQ ID NO:137). While the results varied with the spacer used, and many different lengths for both the RTT and PBS showed good editing efficiency. One optimal combined PBS length and RTT length may be 48 nucleotides and 52 nucleotides, respectively.

### Example 9. Evaluation of Edit Placement in a tagRNA

[0336] REDRAW efficiencies can vary depending on where the desired edit is located within the reverse transcriptase template (RTT) of the tag RNA. In this example, the effect of the location of the edit in the RTT on the percent editing was evaluated. The edit location and results are provided in bold in FIG. 27. The upper and lower panels provide different RTT sequences in which the edit location was varied (upper panel RTT: SEQ ID NO:187; lower panel RTT: SEQ ID NO:188). The ‘Edit location’ column in both the upper and lower panels of FIG. 27 shows the reverse complement of the first 26 bases of RTT, which corresponds to the PAM sequence (TTTC) and the 23-base spacer sequence. We tiled the double mutation along the RTT such that when the desired edit is introduced to the DNA, the spacer used for REDRAW is no longer complementary. Editing was determined to be effective with the edit placement in many locations in the RTT. In some cases, placing the edit in a position in the RTT sequence that corresponds to nucleotide 12-15 (TTTN PAM of LbCas12a is defined as position −4, −3, −2, −1, respectively) provided a very high level of editing.

### Example 10. REDRAW Editing Using Different CRISPR-Cas Effector Proteins

[0337] REDRAW was envisioned to be compatible with alternate CRISPR-Cas effector proteins that are able to generate double-stranded DNA breaks. In this example, LbCas12a with cas9 (SpCas9), BhCas12b, AsCas12a (EnAsCas12a) showing that alternate CRISPR-Cas effector proteins can be used successfully with the methods of this invention (REDRAW).

### Cas9

[0338] RT(5M), tagRNA encoding a precise edit, and two forms of Cas9 (Cas9 (nuclease), nCas9 (D10A) (nickase)) were transformed into HEK293T cells and expressed. The cells were harvested three days after transfection and target amplicons were sequenced using high throughput sequencing (HTS). The lengths of PBS and RTT were varied, and extensions were added to both 3′ and 5′ end of the guide RNA (denoted as ‘3’ extension′ or ‘5’ extension′ in FIG. 28). The tagRNA extensions that were used targeted four different target sites (spacers: pwsp10: GAGTCCGAGCAGAAGAAGAA (SEQ ID NO:140); pwsp621: GCATTTTCAGGAGGAAGCGA (SEQ ID NO:141); pwsp15: GTCATCTTAGTCATTACCTG (SEQ ID NO:142); pwsp11: GGAATCCCTTCTGCAGCACC (SEQ ID NO:143)). The results are provided in FIG. 28.

[0339] Precise RT-mediated editing was observed using both Cas9 and nCas9 (D10A) using multiple different spacer sequences, however, the nuclease version performed best. Further, while both 3′ and 5′ tagRNA extensions were effective in REDRAW, the 3′ extension of the extended guide RNA performed best.

### BhCas12b

[0340] RT(5M), tagRNA encoding a precise edit and BhCas12b v4 (which is an engineered high efficiency version of BhCas12b) were transformed into HEK293T cells and expressed. The cells were harvested three days after transfection and target amplicons were sequenced using high throughput sequencing (HTS). The lengths of PBS and RTT were varied and extensions were added to both 3′ and 5′ end of the guide RNA (denoted as 3′ or 5′ in FIG. 29). The tagRNA extensions that were used targeted three different target sites (spacers: PWsp1099: ACGTACTGATGTTAACAGCTGA (SEQ ID NO:144); PWsp1098: GGTCAGCTGTTAACATCAGTAC (SEQ ID NO:145); PWsp1094: TCCAGCCCGCTGGCCCTGTAAA (SEQ ID NO:146)). The results are provided in FIG. 29. Precise RT-mediated editing was observed using BhCas12b v4 and multiple different spacer sequences. Certain combinations of RTT and PBS lengths resulted in higher editing than others when using BhLbCas12b. In general, 3′ extension of tagRNA provided more consistent editing than 5′ extension when using BhLbCas12b, although editing was detected using both forms of tagRNA.

### EnAsCas12a

[0341] AsCas12a is a homolog of LbCas12a and EnAsCas12a is the engineered version of AsCas12a. The H800A mutation in EnAsCas12a corresponds to H759A mutation in LbCas12a, which is a mutation that inactivates crRNA-processing ability of Cas12a.

[0342] RT(5M), tagRNA encoding a precise edit and EnAsCas12a H800A (EnAsCpf1 H800A) were transformed into HEK293T cells and expressed. In this case, the reverse transcriptase was provided as a fusion protein with the EnAsCas12a (C-terminal fusion (EnAsCas12a-RT) and N-terminal fusion (RT-EnAsCas12a)). The cells were harvested three days after transfection and target amplicons were sequenced using high throughput sequencing (HTS). Precise RT-dependent and tagRNA-dependent edit was observed using EnAsCas12a using multiple different tagRNA sequences. The tagRNA extensions that were used targeted a single site (spacer: CCTCACTCCTGCTCGGTGAATTT (SEQ ID NO:171)).

[0343] The results are provided in FIG. 30, which shows that in the presence of various tagRNAs, both the N-terminal and C-terminal fusions of RT and EnAsCas12a resulted in precise editing. EnAsCas12a without RT fusion was used as a control and showed no or very low editing.

### Example 11. Editing in Yeast

[0344] In addition to showing that human cells can be edited using the methods of the invention, the same was also evaluated in Saccharomyces cerevisiae (yeast), a eukaryote. S. cerevisiae is an attractive organism for evaluating the methods of this invention for several reasons including, for example: (1) S. cerevisiae utilizes NHEJ repair processes; double-stranded breaks in the genome are not lethal, unlike in prokaryotic organisms (such as E. coli) that are often used in directed evolution experiments; (2) yeast grow relatively quickly, allowing rapid testing and tuning many of the conditions for the methods of the invention (REDRAW); (3) thousands of yeast strains are readily available; and (4) large libraries of biomolecules (protein, RNA, etc.) may be investigated in yeast.

[0345] The S. cerevisiae strain W303-1a (hereinafter “ScW303-1a”) was selected for this example. The genotype of ScW303-1a is: MATa ade2-1 ura3-1 his3-11 trp1-1 leu2-3 leu2-112 cant-100. Targets for editing in this strain include ADE2, CAN1, HIS3, LYS2, TRP1, and URA3. Sanger sequencing was used to confirm the loci sequences for each PCR product. All loci that were sequenced were as expected, except for ADE2. The ADE2 locus was expected to have a stop codon at Gln64; however, sequencing showed that instead of a stop codon at Gln64, a tyrosine codon was present. As a consequence, a custom strain with a modified ADE2 locus was constructed in order to test REDRAW at that locus. The modified strain was named ScDS21.6. Table 13 provides the genomic targets selected for testing in yeast.

TABLE 14
Yeast genomic targets for REDRAW editing.

| Strain | | Auxo- | Additional | |
|---|---|---|---|---|
| (Target) | Mutation | trophy | Phenotype | Comments |
| ScDS21.6 | Amino | Adenine | Red colonies | Generated |
| (ADE2) | acid 156 | | | in-house |
| | GGA −> TAA | | | (same effect as |
| | | | | ADE2-1 mutation) |
| W303-1a | Amino | Uracil | 5-FOA | Li et al. |
| (ura3-1) | acid 234 | | resistance | unpublished |
| | GGA −> GAA | | | |

Example spacers for targeting these sites included:

(SEQ ID NO: 159)
PWsp1643 (ADE2 target):
5′ - GCATACGATGGAAGAGGTAACTT - 3′
(SEQ ID NO: 160)
PWsp1894 (ADE2 target):
5′ - GCATACGATTAAAGAGGTAACTT - 3′
(SEQ ID NO: 161)
PWsp1665 (URA3-1 target):
5′ - CAAATAGTCCTCTTTCAACAATA - 3′

### Example Primer Binding Site Sequences:

48-bp primer binding site for ADE2 target:
(SEQ ID NO: 162)
5′ - CGTTGTAAAGAATAAGGAAATGATTCCGGAAGCTTTGGAAGTA
CTGAA - 3′
48-bp primer binding site for URA3-1 target:
(SEQ ID NO: 163)
5′ - ATAATGTCAGATCCTGTAGAGACCACATCATCCACGGTTCTAT
ACTGT - 3′

### Example Reverse Transcriptase Template Sequences:

(A) ADE2 target:
(SEQ ID NO: 164)
40-bp RTT: 5' - TGAAGTCGAGGACTTTGGCATACGATGGAAGAG
GTAACTT - 3'
(SEQ ID NO: 165)
50-bp RTT: 5' -
CCATTCGTCTTGAAGTCGAGGACTTTGGCATACGATGGAAGAGGTAA
CTT - 3'
(SEQ ID NO: 166)
72-bp RTT: 5' -
TGTTGGAAGAGATTTGGGTTTTCCATTCGTCTTGAAGTCGAGGACT
TTGGCATACGATGGAAGAGGTAACTT - 3'
(B) URA3- 1 target
(SEQ ID NO: 167)
47-bp RTT: 5' -
CTACCTTAGCATCCCTTCCCTTTGCAAATAGTCCTCTCTCAACAA
TA - 3'
(SEQ ID NO: 168)
55-bp RTT: 5' -
TTCACCCTCTACCTTAGCATCCCTTCCCTTTGCAAATAGTCCTCT
CTCAACAATA - 3'
(SEQ ID NO: 169)
63-bp RTT: 5' -
CTGTAACGTTCACCCTCTACCTTAGCATCCCTTCCCTTTGCAAAT
AGTCCTCTCTCAACAATA - 3'

Example LbCas12a crRNA Scaffold:

(SEQ ID NO: 170)
5′ - TAATTTCTACTAAGTGTAGAT - 3′

[0348] The protein expression vector pESC-LEU was used because (1) it includes a yeast selectable marker, LEU2, that is compatible with the ScW303-1a strain, (2) the GAL promoter system in the plasmid provides strong control of protein expression, (3) the yeast origin of replication, 2μ, is high copy, allowing for high level of protein expression and (4) the E. coli origin of replication (pUC origin) and the selectable marker, AmpR, are also present, allowing all vector manipulation and cloning in E. coli prior to working in yeast. The following CRISPR-Cas effector protein and reverse transcriptase configurations were used:
[0349] LbCas12a+C-terminally fused MMLV-RT(5M) (SEQ ID NO:155)
[0350] LbCas12a+N-terminally fused MMLV-RT(5M) (SEQ ID NO:157)
   The LbCas12a fusions were placed under control of inducible GAL1 promoter (pol II promoter) and the crRNA and tagRNAs were expressed from the constitutive SNR52 promoter (pol III promoter).

[0351] In addition, the following tagRNA configurations were tested with the two LbCas12a and RT configurations: (1) absence of a 3′ pseudoknot, (2) presence of a pseudoknot, either (a) a pseudoknot referred to as a “decoy” pseudoknot (see FIG. 7, SEQ ID NO:203) or (b) a pseudoknot referred to as tEvoPreQ1 pseudoknot (SEQ ID NO:158). In addition, three different reverse transcriptase template (RTT) lengths (47, 55, 64 nucleotides, or 40, 50 and 72 nucleotides) were each tested with a primer binding site (PBS) having a fixed length of 48 nucleotides. These configurations are set forth in Table 15.

TABLE 15
Example REDRAW configurations tested in yeast

| | | | | REDRAW | 3′ |
|---|---|---|---|---|---|
| pWISE | Target | PBS | RTT | Editor | Pseudoknot |
| 5584 | URA3-1 | 48-bp | 47-bp | C-terminal | None |
| 5585 | | | 55-bp | RT | |
| 5586 | | | 63-bp | | |
| 5890 | URA3-1 | 48-bp | 47-bp | N-terminal | None |
| 5591 | | | 55-bp | RT | |
| 5592 | | | 63-bp | | |
| 5853 | URA3-1 | 48-bp | 47-bp | C-terminal | Decoy Pseudoknot |
| 5854 | | | 55-bp | RT | Decoy Pseudoknot |
| 5855 | | | 63-bp | | Decoy Pseudoknot |
| 5856 | | | 47-bp | | tEvoPreQ1 |
| 5857 | | | 55-bp | | tEvoPreQ1 |
| 5858 | | | 63-bp | | tEvoPreQ1 |
| 5865 | URA3-1 | 48-bp | 47-bp | N-terminal | Decoy Pseudoknot |
| 5866 | | | 55-bp | RT | Decoy Pseudoknot |
| 5867 | | | 63-bp | | Decoy Pseudoknot |
| 5868 | | | 47-bp | | tEvoPreQ1 |
| 5869 | | | 55-bp | | tEvoPreQ1 |
| 5870 | | | 63-bp | | tEvoPreQ1 |
| 5581 | ADE2 | 48-bp | 40-bp | C-terminal | None |
| 5582 | | | 50-bp | RT | |
| 5583 | | | 72-bp | | |
| 5587 | ADE2 | 48-bp | 40-bp | N-terminal | None |
| 5588 | | | 50-bp | RT | |
| 5589 | | | 72-bp | | |
| 5848 | ADE2 | 48-bp | 50-bp | C-terminal | |
| 5849 | | | 72-bp | RT | |
| 5850 | | | 40-bp | | |
| 5851 | | | 50-bp | | |
| 5852 | | | 72-bp | | |
| 5860 | ADE2 | 48-bp | 50-bp | N-terminal | |
| 5861 | | | 72-bp | RT | |
| 5862 | | | 40-bp | | |
| 5863 | | | 50-bp | | |
| 5864 | | | 72-bp | | |
| 5082 (Neg. | ADE2 | N/A | N/A | C- | N/A |
| Control) no | URA3-1 | | | terminally | |
| tagRNA | | | | fused RT | |
| 5083 (Neg. | ADE2 | N/A | N/A | N- | N/A |
| Control) no | URA3-1 | | | terminally | |
| tagRNA | | | | fused RT | |
| 5074 | ADE2 | N/A | N/A | LbCas12a | N/A |
| (Cutting | | | | | |
| Control) | | | | | |
| 5077 | URA3-1 | N/A | N/A | LbCas12a | N/A |
| (Cutting | | | | | |
| control) | | | | | |

[0352] REDRAW was tested in S. cerevisiae by first transforming the vectors of interest into either yeast strain ScDS21.6 (ADE2 target site) or yeast strain ScW303-1a (URA3 target site) via the PEG/LiAc heat shock method. Transformants were plated out onto synthetic complete media lacking leucine, with 2% glucose as the carbon source (SC-LEU+2% Glu). After approximately 48-72 hours, single colonies were then picked into 3-mL of liquid SC-LEU+2% raffinose (SC-LEU+2% Raff). The cultures were grown up at 28° C. with shaking at 200 rpm for approximately 36 hours, until the OD₆₀₀ reached ˜1.8. 1.5 ODs of cells was then spun down at room temperature in the centrifuge and brought back up in 3 mL of protein expression media, SC-LEU+1% raffinose+1% galactose (SC-LEU+1% Raff+1% Gal). Expression cultures were grown at 28° C., with 200 rpm shaking for 4 hours. The expression cultures were then removed from the shaking incubator and centrifuged. The supernatant was then pipetted off, and 3 mL of SC-LEU+2% Glu was added. The cells were then allowed 90 additional minutes of growth at 28° C. and 200 rpm. After 90 minutes, the 0D600 of the culture was checked. About 1 OD yeast cells (about 1×10⁷ yeast cells) of each culture was pelleted in the centrifuge at room temperature. The supernatant was removed, and each culture was re-suspended in 200 uL of sterile water. About half of the resuspended culture (0.5 OD's) (about 5×10⁶ yeast cells) was plated onto synthetic complete plates lacking either adenine (SC-ADE) or uracil (SC-URA) to select for edited colonies, and the other half was plated onto SC-LEU plates (non-selective, to see how many cells were in about 0.5 measured OD's). The plates were grown at 28° C. for approximately 3 days. Colonies were then counted and recorded. Colonies were selected from either SC-ADE/SC-URA plates or SC-LEU (negative control) plates, and the target loci were amplified using colony PCR. Sanger sequencing was used to analyze the target loci, which confirmed that the intended edits were made (2-bp change in ADE2: AA156 TAA->GGA and 1-bp change in URA3-1: AA 234 GGA->GAA).

[0353] Each of the LbCas12a and RT configurations/tagRNA combinations were tested at two different target sites in yeast and the results are provided in FIG. 31 and FIG. 32. FIG. 31 show the results of the editing of the URA3-1 target gene (URA3-1: 1-bp change (AA 234 GGA->GAG) (edit repairs adenine auxotrophy) with the upper panel showing the results with the LbCas12-RT C-terminal fusion and the lower panel showing the results for the RT-LbCas12 N-terminal fusion. FIG. 32 show the results of the editing of the ADE2 target gene (ADE2: 2-bp change (AA 156 TAA->GGA) (edit repairs uracil auxotrophy) with the upper panel showing the results with the LbCas12-RT C-terminal fusion and the lower panel showing the results for the RT-LbCas12 N-terminal fusion. While all configurations were able to edit the URA3-1 gene to produce viable colonies (repairing adenine auxotrophy), the most efficient configuration included a pseudoknot and the RTT having a length of 55 nucleotides (FIG. 31). The RT, LbCas12a C-terminal fusion was most efficient with the “decoy” pseudoknot and the RT, LbCas12a N-terminal fusion was most efficient with the tEvoPreQ1 pseudoknot (FIG. 31). Editing of ADE2 in yeast showed similar results in that the RT, LbCas12a C-terminal fusion was most efficient with the “decoy” pseudoknot and the RT, LbCas12a N-terminal fusion was most efficient with the tEvoPreQ1 pseudoknot (FIG. 32). In the case of ADE2, editing was most efficient with an RTT having a length of 50 nucleotides.

[0354] Thus, this example showed that the methods of the invention are able to precisely edit yeast at both target sites and using either protein fusion configuration with the C-terminally fused RT configuration being slightly more efficient than the N-terminally fused RT for these two targets. The pseudoknots were observed to improve the efficiency of REDRAW editing in each of the configurations tested. Further, in the absence of the tagRNA and REDRAW editor, no growth is observed on the selective plates (SC-ADE or SC-URA), indicating that these REDRAW assays in yeast are very stringent and escape frequency is below the detection limit.

### Example 12. Evaluation of ssRNA Binding Proteins in Editing

[0355] Single-stranded RNA binding proteins (ssRNA BP) are proteins that interact nonspecifically with ribonucleic acids. Expressing ssRNA binding proteins when editing with the methods of the invention may stabilize the exposed tagRNA component (extended guide nucleic acid) from degradation by endogenous proteins. To test this, we expressed several RNA binding proteins as an N-terminal fusion to RT(5M)-LbCas12a(H759A).

[0356] The precise editing results using the ssRNA binding proteins, defensin (SEQ ID NO:152) and ORFS (SEQ ID NO:153 are provided in FIG. 33. The ssRNA BP defensin and the ssRNA BP ORFS were each fused to the N-terminus of a RT-LbCas12 fusion protein (e.g., RT-LbCas12a). The editing is shown as compared to the same RT-Cas12a fusion protein that is not fused at its N-terminus to a ssRNA binding protein. Precise editing was shown to improve with the use of a ssRNA binding protein for one of the two tagRNAs (extended guide nucleic acids) tested.

### Example 13. Evaluation of Reverse Transcriptase Polypeptides Having Different Mutations

[0357] The reverse transcriptase RT(5M) was engineered by introducing five mutations into wildtype RT sequence (Anzalone et al. Nature 576:149-157 (2019)). To evaluate whether the methods of the invention can be further optimized by using an RT domain having different or additional mutations compared to that of RT(5M), several reverse transcriptase (RT) proteins having different mutations and combinations of mutations, with or without the RT(5M) core mutations, were fused to LbCas12a (H759A) at the N-terminus. The RT domains tested included: RT(L139P, D200N, W388R, E607K), RT(L139P, D200N, T306K, W313F, W388R, E607K), RT(5M, F155Y, H638G), RT(5M, Q221R, V223M) and RT(5M, D524N). The mutations in RT(M) include D200N+L603W+T330P+T306K+W313F with reference to the amino acid sequence numbering of SEQ ID NO:172 (see, SEQ ID NO:53) The reference RT for amino acid position numbering for those sequences that do not include RT(5M) mutations is SEQ ID NO:172. The reference RT for amino acid position numbering for those sequences that include RT(5M) mutations is SEQ ID NO:53. In each case, the RT was fused to the N-terminus of LbCas12a (H759A).

[0358] FIG. 34 shows the results. Compared to RT(5M) (left), several other RT domains having different combinations of mutations were able to increase the precise editing as compared to RT(5M). This result was influenced by the tagRNA (extended guide nucleic acid) that was used.

### Example 14. Evaluation of 3′ Structured RNA Motifs Incorporated at the 3′ End the tagRNA

[0359] Experiments were carried out to evaluate whether a structured RNA incorporated at 3′ end of a tagRNA might further stabilize tagRNA and protect it from possible degradation. For this purpose, several RNA sequences known to form 3-D structures, including hairpins and pseudoknots, were appended to different tagRNAs.

TABLE 16
DNA sequences that correspond to RNA structures when transcribed and appended
to the 3′ end of tagRNA

| | |
|---|---|
| AsCpf1BB | TAATTTCTACTCTTGTAGAT SEQ ID NO: 189 |
| BoxB | GGGCCCTGAAGAAGGGCCC SEQ ID NO: 190 |
| Pseudoknot | TAAGTCTCCATAGAATGGAGG SEQ ID NO: 95 (see also, SEQ ID NO: 203) - |
| (decoy) | |
| evopreQ1 | TTGACGCGGTTCTATCTAGTTACGCGTTAAACCAACUAGAAA SEQ ID NO: 191 |
| fmpknot | GGAGGTCAGGGTCAGGAGCCCCCCCCTGAACCCAGGATAACCCTCAAAGTCG |
| | GGGGGCAACCC SEQ ID NO: 192 |
| mpknot | GGGTCAGGAGCCCCCCCCTGAACCCAGGATAACCCTCAAAGTCGGGGGGCA |
| | ACCC SEQ ID NO: 193 |
| MS2 | GGCCAACATGAGGATCACCCATGTCTGCAGGGCC SEQ ID NO: 194 |
| PP7 | CCGGAGCAGACGATATGGCGTCGCTCCGG SEQ ID NO: 195 |
| SLBP | CCAAAGGCTCTTCTCAGAGCCACCCA SEQ ID NO: 196 |
| TAR | GGCCAGATCTGAGCCTGGGAGCTCTCTGGCC SEQ ID NO: 197 |
| ThermoPh | ATATAACCTTCACCATTAGGTTCAAATAATGGTAAT SEQ ID NO: 198 |

TABLE 17
Sources for the RNA structures in Table 16

| Name | Source |
|---|---|
| AsCpf1BB | Natural crRNA sequence from Acidaminococcus sp. |
| BoxB | Nat Biotechnol. 2016 May; 34(5): 528-30. |
| Pseudoknot | Patent: W02021092130 |
| (decoy) | |
| Pseudoknot | Nat Biotechnol. 2021 Oct. 4. doi: |
| (evopreQ1) | 10.1038/s41587-021-01039-7. |
| fmpknot | Nature 480, 561-564 (2011) |
| mpknot | Nat Biotechnol. 2021 Oct. 4. doi: |
| | 10.1038/s41587-021-01039-7. |
| MS2 | Nat Biotechnol. 2016 May; 34(5): 528-30. |
| PP7 | Nat Biotechnol. 2016 May; 34(5): 528-30. |
| SLBP | Cell. 2019 Jun. 27; 178(1): 122-134.e12. |
| TAR | Cell. 2019 Jun. 27; 178(1): 122-134.e12. |
| ThermoPh | Proc Natl Acad Sci USA. 1999 Jun. 8; 96(12): 6621-6625 |

[0360] The results of including various 3′ structured RNAs in the compositions of the invention are provided in FIG. 35. In this experiment, RT(5M)-LbCas12a H759A with various tagRNAs was expressed with or without 3′ RNA structures in HEK293T cells. After 3 days, the cells were harvested, and the precise editing efficiency was analyzed by high throughput sequencing. We observed that almost all 3′ RNA structures on tagRNA can accommodate the methods of this invention (e.g., REDRAW). We did not observe an increase in REDRAW efficiency by using the 3′ RNA structures in HEK293T cells.

### Example 15. Evaluation of the Use of Chromatin Modulating Peptide Fusions

[0361] Genome editing proteins can be occluded by nucleosomes that reduce their activity in living cells. Chromatin-modulating proteins/peptides may be helpful in addressing such affects by promoting chromatin exchange, histone modification, and epigenome modifications, thereby enhancing access by such programmable DNA binding proteins as, for example, Cas9 or Cas12a.

[0362] To evaluate this possibility, chromatin-modulating peptides, including CHD1 (e.g., SEQ ID NO:199), H1G (e.g., SEQ ID NO:200), HB1 (e.g., SEQ ID NO:201), and HN1 (e.g., SEQ ID NO:202) (see, e.g., Ding et al., CRISPR J. 2019 February; 2:51-63) were fused to selected constructs of the invention in various fusion orientations as follows: HN1-RT(5M)-LBCas12a (H759A), HN1-RT(5M)-LBCas12a (H759A)-HB1, HN1-RT(5M)-LBCas12a (H759A)-H1G, HN1-RT(5M)-LBCas12a (H759A)-CHD1, HN1-RT(5M)-H1G-LBCas12a (H759A) and HN1-RT(5M)-CHD1-LBCas12a (H759A).

[0363] The precise editing results using chromatin-modulating peptides with constructs of the invention are provided in FIG. 36. Compared to the construct without any additional fusions (e.g., RT(5M)-LbCas12a H759A), many of the constructs did not result in an increase in precise editing activity. A slight increase in precise editing activity was observed for HN1-RT(5M)-LbCas12a (H759A)-HB1 with two of the tagRNAs, tagRNA5 and tagRNA6.

### Example 16. Evaluation of Concurrent Nicking of the Non-Template Strand of Constructs of the Invention

[0364] An intermediate during genome editing events including, for example, base editing, Prime editing, and REDRAW, can be a mismatched DNA duplex where one strand of DNA has been edited by the enzyme (desired edit) and the opposite strand contains wild type sequence. Resolution of such a mismatch towards production of the desired edit can be important to ensure that the desired edit becomes permanent in the cell.

[0365] Nicking of the DNA strand opposite of the strand containing the edit is thought to promote the process of making the edit permanent by utilizing mismatch repair (MMR) in the cell. In eukaryotes, MMR resolves base mismatches by identifying the DNA strand that contains a nick (which suggests a newly synthesized strand, therefore ‘likely’ to contain a ‘mistake’) and removes that strand and re-synthesize a completely complementary DNA. This way, DNA containing the wildtype sequence is removed, and new DNA is made that is fully complementary to DNA that contains the desired edit. This approach has been used to improve the editing efficiencies of base editors (Komor et al. Nature 533: 420-424 (2016)) and Prime editors (Anzalone et al. Nature 576:149-157 (2019)).

[0366] We sought to evaluate the same with the constructs and methods of the invention (REDRAW). In REDRAW, the edit is contained in the template strand of DNA (the DNA strand that is hybridized by crRNA). Therefore, we wanted to determine if nicking the non-template strand during the editing process, near the vicinity of the edit, might increase the precise editing efficiency of REDRAW.

[0367] Fu et al. previously reported that crRNAs that contain various mismatches in base positions between 12-15 can lead to Cas12a becoming a non-template strand nickase rather than acting as a nuclease (TTTV PAM is denoted as position −4, 3, 2, 1) (Fu et al, Nat Microbiol. 2019 May; 4(5):888-897). To determine if such an approach might be effective in increasing the precise editing achieved with the methods and constructs of the invention, a crRNA (in contrast to the extended guide nucleic acids, tagRNAs) comprising various mismatches was prepared and utilized with the constructs of the invention to edit a target DNA. The results are shown in Table 18.

TABLE 18
Precise editing efficiencies (%) with three different
tagRNAs. In this experiment, RT(5M)-LbCas12a H759A
fusion was used with tagRNA15, tagRNA16, or tagRNA17.
The complementarity/mismatches of the spacers in the
crRNAs used in this example are described below.

| | tagRNA15 | tagRNA16 | tagRNA17 |
|---|---|---|---|
| No nicking crRNA | 0.69 | 0.00 | 0.51 |
| crRNA; full complementarity | 0.00 | 0.00 | 0.00 |
| crRNA; mismatch at P12 | 0.00 | 0.00 | 4.62 |
| crRNA; mismatch at P13 | 0.00 | 0.00 | 0.00 |
| crRNA; mismatch at P14 | 0.00 | 0.00 | 0.00 |
| crRNA; mismatch at P15 | 0.00 | 0.41 | 0.36 |
| crRNA; mismatch at P12, 13 | 3.77 | 4.42 | 4.46 |
| crRNA; mismatch at P13, 14 | 0.15 | 0.28 | 1.08 |
| crRNA; mismatch at P12, 13, 14 | 0.68 | 0.66 | 0.98 |
| crRNA; mismatch at P13, 14, 15 | 0.00 | 0.00 | 0.74 |

[0368] Compared to the treatment where no nicking crRNA was used, the crRNAs that contain single, double, or triple mismatches at positions 12-15 led to an increase in editing efficiency. Taken together, concurrent expression of crRNA (in addition to a tagRNA) that contains appropriate mismatches may be used to induce a nick on the non-template strand and thereby increase the precise editing efficiency of the methods of the invention.

[0369] The foregoing is illustrative of the present invention and is not to be construed as limiting thereof. The invention is defined by the following claims, with equivalents of the claims to be included therein.

The application's sequence listing, which the Patent Office published only in electronic form, follows.

SEQUENCE LISTING (215 sequences)

SEQ ID NO: 1 - protein, 1228 aa, Unknown
  Lachnospiraceae bacterium
MSKLEKFTNCYSLSKTLRFKAIPVGKTQENIDNKRLLVEDEKRAEDYKGVKKLLDRYYLSFINDVLHSIKLKNLNNYISLFRKKTRTEKENKELENLEINLRKEIAKAFKGNEGYKSLFKKDIIETILPEFLDDKDEIALVNSFNGFTTAFTGFFDNRENMFSEEAKSTSIAFRCINENLTRYISNMDIFEKVDAIFDKHEVQEIKEKILNSDYDVEDFFEGEFFNFVLTQEGIDVYNAIIGGFVTESGEKIKGLNEYINLYNQKTKQKLPKFKPLYKQVLSDRESLSFYGEGYTSDEEVLEVFRNTLNKNSEIFSSIKKLEKLFKNFDEYSSAGIFVKNGPAISTISKDIFGEWNVIRDKWNAEYDDIHLKKKAVVTEKYEDDRRKSFKKIGSFSLEQLQEYADADLSVVEKLKEIIIQKVDEIYKVYGSSEKLFDADFVLEKSLKKNDAVVAIMKDLLDSVKSFENYIKAFFGEGKETNRDESFYGDFVLAYDILLKVDHIYDAIRNYVTQKPYSKDKFKLYFQNPQFMGGWDKDKETDYRATILRYGSKYYLAIMDKKYAKCLQKIDKDDVNGNYEKINYKLLPGPNKMLPKVFFSKKWMAYYNPSEDIQKIYKNGTFKKGDMFNLNDCHKLIDFFKDSISRYPKWSNAYDFNFSETEKYKDIAGFYREVEEQGYKVSFESASKKEVDKLVEEGKLYMFQIYNKDFSDKSHGTPNLHTMYFKLLFDENNHGQIRLSGGAELFMRRASLKKEELVVHPANSPIANKNPDNPKKTTTLSYDVYKDKRFSEDQYELHIPIAINKCPKNIFKINTEVRVLLKHDDNPYVIGIDRGERNLLYIVVVDGKGNIVEQYSLNEIINNFNGIRIKTDYHSLLDKKEKERFEARQNWTSIENIKELKAGYISQVVHKICELVEKYDAVIALEDLNSGFKNSRVKVEKQVYQKFEKMLIDKLNYMVDKKSNPCATGGALKGYQITNKFESFKSMSTQNGFIFYIPAWLTSKIDPSTGFVNLLKTKYTSIADSKKFISSFDRIMYVPEEDLFEFALDYKNFSRTDADYIKKWKLYSYGNRIRIFRNPKKNNVFDWEEVCLTSAYKELFNKYGINYQQGDIRALLCEQSDKAFYSSFMALMSLMLQMRNSITGRTDVDFLISPVKNSDGIFYDSRNYEAQENAILPKNADANGAYNIARKVLWAIGQFKKAEDEKLDKVKIAISNKEWLEYAQTSVKH

SEQ ID NO: 2 - protein, 1307 aa, Acidaminococcus sp.
MTQFEGFTNLYQVSKTLRFELIPQGKTLKHIQEQGFIEEDKARNDHYKELKPIIDRIYKTYADQCLQLVQLDWENLSAAIDSYRKEKTEETRNALIEEQATYRNAIHDYFIGRTDNLTDAINKRHAEIYKGLFKAELFNGKVLKQLGTVTTTEHENALLRSFDKFTTYFSGFYENRKNVFSAEDISTAIPHRIVQDNFPKFKENCHIFTRLITAVPSLREHFENVKKAIGIFVSTSIEEVFSFPFYNQLLTQTQIDLYNQLLGGISREAGTEKIKGLNEVLNLAIQKNDETAHIIASLPHRFIPLFKQILSDRNTLSFILEEFKSDEEVIQSFCKYKTLLRNENVLETAEALFNELNSIDLTHIFISHKKLETISSALCDHWDTLRNALYERRISELTGKITKSAKEKVQRSLKHEDINLQEIISAAGKELSEAFKQKTSEILSHAHAALDQPLPTTLKKQEEKEILKSQLDSLLGLYHLLDWFAVDESNEVDPEFSARLTGIKLEMEPSLSFYNKARNYATKKPYSVEKFKLNFQMPTLASGWDVNKEKNNGAILFVKNGLYYLGIMPKQKGRYKALSFEPTEKTSEGFDKMYYDYFPDAAKMIPKCSTQLKAVTAHFQTHTTPILLSNNFIEPLEITKEIYDLNNPEKEPKKFQTAYAKKTGDQKGYREALCKWIDFTRDFLSKYTKTTSIDLSSLRPSSQYKDLGEYYAELNPLLYHISFQRIAEKEIMDAVETGKLYLFQIYNKDFAKGHHGKPNLHTLYWTGLFSPENLAKTSIKLNGQAELFYRPKSRMKRMAHRLGEKMLNKKLKDQKTPIPDTLYQELYDYVNHRLSHDLSDEARALLPNVITKEVSHEIIKDRRFTSDKFFFHVPITLNYQAANSPSKFNQRVNAYLKEHPETPIIGIDRGERNLIYITVIDSTGKILEQRSLNTIQQFDYQKKLDNREKERVAARQAWSVVGTIKDLKQGYLSQVIHEIVDLMIHYQAVVVLENLNFGFKSKRTGIAEKAVYQQFEKMLIDKLNCLVLKDYPAEKVGGVLNPYQLTDQFTSFAKMGTQSGFLFYVPAPYTSKIDPLTGFVDPFVWKTIKNHESRKHFLEGFDFLHYDVKTGDFILHFKMNRNLSFQRGLPGFMPAWDIVFEKNETQFDAKGTPFIAGKRIVPVIENHRFTGRYRDLYPANELIALLEEKGIVFRDGSNILPKLLENDDSHAIDTMVALIRSVLQMRNSNAATGEDYINSPVRDLNGVCFDSRFQNPEWPMDADANGAYHIALKGQLLLNHLKESKDLKLQNGISNQDWLAYIQELRN

SEQ ID NO: 3 - protein, 1241 aa, Utyrivibrio proteoclasticus
MLLYENYTKRNQITKSLRLELRPQGKTLRNIKELNLLEQDKAIYALLERLKPVIDEGIKDIARDTLKNCELSFEKLYEHFLSGDKKAYAKESERLKKEIVKTLIKNLPEGIGKISEINSAKYLNGVLYDFIDKTHKDSEEKQNILSDILETKGYLALFSKFLTSRITTLEQSMPKRVIENFEIYAANIPKMQDALERGAVSFAIEYESICSVDYYNQILSQEDIDSYNRLISGIMDEDGAKEKGINQTISEKNIKIKSEHLEEKPFRILKQLHKQILEEREKAFTIDHIDSDEEVVQVTKEAFEQTKEQWENIKKINGFYAKDPGDITLFIVVGPNQTHVLSQLIYGEHDRIRLLLEEYEKNTLEVLPRRTKSEDARYDKFVNAVPKKVAKESHTFDGLQKMTGDDRLFILYRDELARNYMRIKEAYGTFERDILKSRRGIKGNRDVQESLVSFYDELTKFRSALRIINSGNDEKADPIFYNTFDGIFEKANRTYKAENLCRNYVTKSPADDARIMASCLGTPARLRTHWWNGEENFAINDVAMIRRGDEYYYFVLTPDVKPVDLKTKDETDAQIFVQRKGAKSFLGLPKALFKCILEPYFESPEHKNDKNCVIEEYVSKPLTIDRRAYDIFKNGTFKKTNIGIDGLTEEKFKDDCRYLIDVYKEFIAVYTRYSCFNMSGLKRADEYNDIGEFFSDVDTRLCTMEWIPVSFERINDMVDKKEGLLFLVRSMFLYNRPRKPYERTFIQLFSDSNMEHTSMLLNSRAMIQYRAASLPRRVTHKKGSILVALRDSNGEHIPMHIREAIYKMKNNFDISSEDFIMAKAYLAEHDVAIKKANEDIIRNRRYTEDKFFLSLSYTKNADISARTLDYINDKVEEDTQDSRMAVIVTRNLKDLTYVAVVDEKNNVLEEKSLNEIDGVNYRELLKERTKIKYHDKTRLWQYDVSSKGLKEAYVELAVTQISKLATKYNAVVVVESMSSTFKDKFSFLDEQIFKAFEARLCARMSDLSFNTIKEGEAGSISNPIQVSNNNGNSYQDGVIYFLNNAYTRTLCPDTGFVDVFDKTRLITMQSKRQFFAKMKDIRIDDGEMLFTFNLEEYPTKRLLDRKEWTVKIAGDGSYFDKDKGEYVYVNDIVREQIIPALLEDKAVFDGNMAEKFLDKTAISGKSVELIYKWFANALYGIITKKDGEKIYRSPITGTEIDVSKNTTYNFGKKFMFKQEYRGDGDFLDAFLNYMQAQDIAV

SEQ ID NO: 4 - protein, 1238 aa, Candidatus Methanoplasma termitum
MNNYDEFTKLYPIQKTIRFELKPQGRTMEHLETFNFFEEDRDRAEKYKILKEAIDEYHKKFIDEHLTNMSLDWNSLKQISEKYYKSREEKDKKVFLSEQKRMRQEIVSEFKKDDRFKDLFSKKLFSELLKEEIYKKGNHQEIDALKSFDKFSGYFIGLHENRKNMYSDGDEITAISNRIVNENFPKFLDNLQKYQEARKKYPEWIIKAESALVAHNIKMDIVFSLEYFNKVLNQEGIQRYNLALGGYVTKSGEKMMGLNDALNLAHQSEKSSKGRIHMTPLFKQILSEKESFSYIPDVFTEDSQLLPSIGGFFAQIENDKDGNIFDRALELISSYAEYDTERIYIRQADINRVSNVIFGEWGTLGGLMREYKADSINDINLERTCKKVDKWLDSKEFALSDVLEAIDRTGNNDAFNEYISKMRTAREKIDAARKEMKFISEKISGDEESIHIIKTLLDSVQQFLHFFNLFKARQDIPLDGAFYAEFDEVHSKLFAIVPLYNKVRNYLTKNNLNTKKIKLNFKNPTLANGWDQNKVYDYASLIFLRDGNYYLGIINPKRKKNIKFEQGSGNGPFYRKMVYKQIPGPNKNLRPVFLTSTKGKKEYKPSKEIIEGYEADKHIRGDKFDLDFCHKLIDFFKESIEKHKDWSKFNFYFSPTESYGDISEFYLDVEKQGYRMHFENISAETIDEYVEKGDLFLFQIYNKDFVKAATGKKDMHTIYWNAAFSPENLQDVVVKLNGEAELFYRDKSDIKEIVHREGEILVNRTYNGRTPVPDKIHKKLTDYHNGRTKDLGEAKEYLDKVRYFKAHYDITKDRRYLNDKIYFHVPLTLNFKANGKKNLNKMVIEKFLSDEKAHIIGIDRGERNLLYYSIIDRSGKIIDQQSLNVIDGFDYREKLNQREIEMKDARQSWNAIGKIKDLKEGYLSKAVHEITKMAIQYNAIVVMEELNYGFKRGRFKVEKQIYQKFENMLIDKMNYLVFKDAPDESPGGVLNAYQLTNPLESFAKLGKQTGILFYVPAAYTSKIDPTTGFVNLFNTSSKTNAQERKEFLQKFESISYSAKDGGIFAFAFDYRKFGTSKTDHKNVWTAYTNGERMRYIKEKKRNELFDPSKEIKEALTSSGIKYDGGQNILPDILRSNNNGLIYTMYSSFIAAIQMRVYDGKEDYIISPIKNSKGEFFRTDPKRRELPIDADANGAYNIALRGELTMRAIAEKFDPDSEKMAKLELKHKDWFEFMQTRGD

SEQ ID NO: 5 - protein, 1281 aa, Eubacterium eligens
MNGNRSIVYREFVGVIPVAKTLRNELRPVGHTQEHIIQNGLIQEDELRQEKSTELKNIMDDYYREYIDKSLSGVTDLDFTLLFELMNLVQSSPSKDNKKALEKEQSKMREQICTHLQSDSNYKNIFNAKLLKEILPDFIKNYNQYDVKDKAGKLETLALFNGFSTYFTDFFEKRKNVFTKEAVSTSIAYRIVHENSLIFLANMTSYKKISEKALDEIEVIEKNNQDKMGDWELNQIFNPDFYNMVLIQSGIDFYNEICGVVNAHMNLYCQQTKNNYNLFKMRKLHKQILAYTSTSFEVPKMFEDDMSVYNAVNAFIDETEKGNIIGKLKDIVNKYDELDEKRIYISKDFYETLSCFMSGNWNLITGCVENFYDENIHAKGKSKEEKVKKAVKEDKYKSINDVNDLVEKYIDEKERNEFKNSNAKQYIREISNIITDTETAHLEYDDHISLIESEEKADEMKKRLDMYMNMYHWAKAFIVDEVLDRDEMFYSDIDDIYNILENIVPLYNRVRNYVTQKPYNSKKIKLNFQSPTLANGWSQSKEFDNNAIILIRDNKYYLAIFNAKNKPDKKIIQGNSDKKNDNDYKKMVYNLLPGANKMLPKVFLSKKGIETFKPSDYIISGYNAHKHIKTSENFDISFCRDLIDYFKNSIEKHAEWRKYEFKFSATDSYSDISEFYREVEMQGYRIDWTYISEADINKLDEEGKIYLFQIYNKDFAENSTGKENLHTMYFKNIFSEENLDKIIKLNGQAELFYRRASVKNPVKHKKDSVLVNKTYKNQLDNGDVVRIPIPDDIYNEIYKMYNGYIKESDLSEAAKEYLDKVEVRTAQKDIVKDYRYTVDKYFIHTPITINYKVTARNNVNDMVVKYIAQNDDIHVIGIDRGERNLIYISVIDSHGNIVKQKSYNILNNYDYKKKLVEKEKTREYARKNWKSIGNIKELKEGYISGVVHEIAMLIVEYNAIIAMEDLNYGFKRGRFKVERQVYQKFESMLINKLNYFASKEKSVDEPGGLLKGYQLTYVPDNIKNLGKQCGVIFYVPAAFTSKIDPSTGFISAFNFKSISTNASRKQFFMQFDEIRYCAEKDMFSFGFDYNNFDTYNITMGKTQWTVYTNGERLQSEFNNARRTGKTKSINLTETIKLLLEDNEINYADGHDIRIDMEKMDEDKKSEFFAQLLSLYKLTVQMRNSYTEAEEQENGISYDKIISPVINDEGEFFDSDNYKESDDKECKMPKDADANGAYCIALKGLYEVLKIKSEWTEDGFDRNCLKLPHAEWLDFIQNKRYE

SEQ ID NO: 6 - protein, 1300 aa, Francisella novicida
MSIYQEFVNKYSLSKTLRFELIPQGKTLENIKARGLILDDEKRAKDYKKAKQIIDKYHQFFIEEILSSVCISEDLLQNYSDVYFKLKKSDDDNLQKDFKSAKDTIKKQISEYIKDSEKFKNLFNQNLIDAKKGQESDLILWLKQSKDNGIELFKANSDITDIDEALEIIKSFKGWTTYFKGFHENRKVNYSSNDIPTSIIYRIVDDNLPKFLENKAKYESLKDKAPEAINYEQIKKDLAEELTFDIDYKTSEVNQRVFSLDEVFEIANFNNYLNQSGITKFNTIIGGKFVNGENTKRKGINEYINLYSQQINDKTLKKYKMSVLFKQILSDTESKSFVIDKLEDDSDVVTTMQSFYEQIAAFKTVEEKSIKETLSLLFDDLKAQKLDLSKIYFKNDKSLTDLSQQVFDDYSVIGTAVLEYITQQIAPKNLDNPSKKEQELIAKKTEKAKYLSLETIKLALEEFNKHRDIDKQCRFEEILANFAAIPMIFDEIAQNKDNLAQISIKYQNQGKKDLLQASAEDDVKAIKDLLDQTNNLLHKLKIFHISQSEDKANILDKDEHFYLVFEECYFELANIVPLYNKIRNYITQKPYSDEKFKLNFENSTLANGWDKNKEPDNTAILFIKDDKYYLGVMNKKNNKIFDDKAIKENKGEGYKKIVYKLLPGANKMLPKVFFSAKSIKFYNPSEDILRIRNHSTHTKNGSPQKGYEKFEFNIEDCRKFIDFYKQSISKHPEWKDFGFRFSDTQRYNSIDEFYREVENQGYKLTFENISESYIDSVVNQGKLYLFQIYNKDFSAYSKGRPNLHTLYWKALFDERNLQDVVYKLNGEAELFYRKQSIPKKITHPAKEAIANKNKDNPKKESVFEYDLIKDKRFTEDKFFFHCPITINFKSSGANKFNDEINLLLKEKANDVHILSIDRGERHLAYYTLVDGKGNIIKQDTFNIIGNDRMKTNYHDKLAAIEKDRDSARKDWKKINNIKEMKEGYLSQVVHEIAKLVIEYNAIVVFEDLNFGFKRGRFKVEKQVYQKLEKMLIEKLNYLVFKDNEFDKTGGVLRAYQLTAPFETFKKMGKQTGIIYYVPAGFTSKICPVTGFVNQLYPKYESVSKSQEFFSKFDKICYNLDKGYFEFSFDYKNFGDKAAKGKWTIASFGSRLINFRNSDKNHNWDTREVYPTKELEKLLKDYSIEYGHGECIKAAICGESDKKFFAKLTSVLNTILQMRNSKTGTELDYLISPVADVNGNFFDSRQAPKNMPQDADANGAYHIGLKGLMLLGRIKNNQEGKKLNLVIKNEEYFEFVQNRNN

SEQ ID NO: 7 - protein, 1206 aa, Unknown
  Lachnospiraceae bacterium
MYYESLTKQYPVSKTIRNELIPIGKTLDNIRQNNILESDVKRKQNYEHVKGILDEYHKQLINEALDNCTLPSLKIAAEIYLKNQKEVSDREDFNKTQDLLRKEVVEKLKAHENFTKIGKKDILDLLEKLPSISEDDYNALESFRNFYTYFTSYNKVRENLYSDKEKSSTVAYRLINENFPKFLDNVKSYRFVKTAGILADGLGEEEQDSLFIVETFNKTLTQDGIDTYNSQVGKINSSINLYNQKNQKANGFRKIPKMKMLYKQILSDREESFIDEFQSDEVLIDNVESYGSVLIESLKSSKVSAFFDALRESKGKNVYVKNDLAKTAMSVIVFENWRTFDDLLNQEYDLANENKKKDDKYFEKRQKELKKNKSYSLEHLCNLSEDSCNLIENYIHQISDDIENIIINNETFLRIVINEHDRSRKLAKNRKAVKAIKDFLDSIKVLERELKLINSSGQELEKDLIVYSAHEELLVELKQVDSLYNMTRNYLTKKPFSTEKVKLNFNRSTLLNGWDRNKETDNLGVLLLKDGKYYLGIMNTSANKAFVNPPVAKTEKVFKKVDYKLLPVPNQMLPKVFFAKSNIDFYNPSSEIYSNYKKGTHKKGNMFSLEDCHNLIDFFKESISKHEDWSKFGFKFDTQASYNDISEFYREVEKQGYKLTYTDIDETYINDLIERNELYLFQIYNKDFSMYSKGKLNLHTLYFMMLFDQRNIDDVVYKLNGEAEVFYRPASISEDELIIHKAGEEIKNKNPNRARTKETSTFSYDIVKDKRYSKDKFTLHIPITMNFGVDEVKRFNDAVNSAIRIDENVNVIGIDRGERNLLYVVVIDSKGNILEQISLNSIINKEYDIETDYHALLDEREGGRDKARKDWNTVENIRDLKAGLYLQVVNVVAKLVLKYNAIICLEDLNFGFKRGRQKVEKQVYQKFEKMLIDKLNYLVIDKSREQTSPKELGGALNALQLTSKFKSFKELGKQSGVIYYVPAYLTSKIDPTTGFANLFYMKCENVEKSKRFFDGFDFIRFNALENVFEFGFDYRSFTQRACGINSKWTVCTNGERIIKYRNPDKNNMFDEKVVVVTDEMKNLFEQYKIPYEDGRNVKDMIISNEEAEFYRRLYRLLQQTLQMRNSTSDGTRDYIISPVKNKREAYFNSELSDGSVPKDADANGAYNIARKGLWVLEQIRQKSEGEKINLAMTNAEWLEYAQTHLL

SEQ ID NO: 8 - protein, 1233 aa, Unknown
  Lachnospiraceae bacterium
MDYGNGQFERRAPLTKTITLRLKPIGETRETIREQKLLEQDAAFRKLVETVTPIVDDCIRKIADNALCHFGTEYDFSCLGNAISKNDSKAIKKETEKVEKLLAKVLTENLPDGLRKVNDINSAAFIQDTLTSFVQDDADKRVLIQELKGKTVLMQRFLTTRITALTVWLPDRVFENFNIFIENAEKMRILLDSPLNEKIMKFDPDAEQYASLEFYGQCLSQKDIDSYNLIISGIYADDEVKNPGINEIVKEYNQQIRGDKDESPLPKLKKLHKQILMPVEKAFFVRVLSNDSDARSILEKILKDTEMLPSKIIEAMKEADAGDIAVYGSRLHELSHVIYGDHGKLSQIIYDKESKRISELMETLSPKERKESKKRLEGLEEHIRKSTYTFDELNRYAEKNVMAAYIAAVEESCAEIMRKEKDLRTLLSKEDVKIRGNRHNTLIVKNYFNAWTVFRNLIRILRRKSEAEIDSDFYDVLDDSVEVLSLTYKGENLCRSYITKKIGSDLKPEIATYGSALRPNSRWWSPGEKFNVKFHTIVRRDGRLYYFILPKGAKPVELEDMDGDIECLQMRKIPNPTIFLPKLVFKDPEAFFRDNPEADEFVFLSGMKAPVTITRETYEAYRYKLYTVGKLRDGEVSEEEYKRALLQVLTAYKEFLENRMIYADLNFGFKDLEEYKDSSEFIKQVETHNTFMCWAKVSSSQLDDLVKSGNGLLFEIWSERLESYYKYGNEKVLRGYEGVLLSILKDENLVSMRTLLNSRPMLVYRPKESSKPMVVHRDGSRVVDRFDKDGKYIPPEVHDELYRFFNNLLIKEKLGEKARKILDNKKVKVKVLESERVKWSKFYDEQFAVTFSVKKNADCLDTTKDLNAEVMEQYSESNRLILIRNTTDILYYLVLDKNGKVLKQRSLNIINDGARDVDWKERFRQVTKDRNEGYNEWDYSRTSNDLKEVYLNYALKEIAEAVIEYNAILIIEKMSNAFKDKYSFLDDVTFKGFETKKLAKLSDLHFRGIKDGEPCSFTNPLQLCQNDSNKILQDGVIFMVPNSMTRSLDPDTGFIFAINDHNIRTKKAKLNFLSKFDQLKVSSEGCLIMKYSGDSLPTHNTDNRVWNCCCNHPITNYDRETKKVEFIEEPVEELSRVLEENGIETDTELNKLNERENVPGKVVDAIYSLVLNYLRGTVSGVAGQRAVYYSPVTGKKYDISFIQAMNLNRKCDYYRIGSKERGEWTDFVAQLIN

SEQ ID NO: 9 - protein, 1227 aa, Unknown
  Lachnospiraceae bacterium
MSKLEKFTNCYSLSKTLRFKAIPVGKTQENIDNKRLLVEDEKRAEDYKGVKKLLDRYYLSFINDVLHSIKLKNLNNYISLFRKKTRTEKENKELENLEINLRKEIAKAFKGNEGYKSLFKKDIIETILPEFLDDKDEIALVNSFNGFTTAFTGFFDNRENMFSEEAKSTSIAFRCINENLTRYISNMDIFEKVDAIFDKHEVQEIKEKILNSDYDVEDFFEGEFFNFVLTQEGIDVYNAIIGGFVTESGEKIKGLNEYINLYNQKTKQKLPKFKPLYKQVLSDRESLSFYGEGYTSDEEVLEVFRNTLNKNSEIFSSIKKLEKLFKNFDEYSSAGIFVKNGPAISTISKDIFGEWNVIRDKWNAEYDDIHLKKKAVVTEKYEDDRRKSFKKIGSFSLEQLQEYADADLSVVEKLKEIIIQKVDEIYKVYGSSEKLFDADFVLEKSLKKNDAVVAIMKDLLDSVKSFENYIKAFFGEGKETNRDESFYGDFVLAYDILLKVDHIYDAIRNYVTQKPYSKDKFKLYFQNPQFMGGWDKDKETDYRATILRYGSKYYLAIMDKKYAKCLQKIDKDDVNGNYEKINYKLLPGPNKMLPKVFFSKKWMAYYNPSEDIQKIYKNGTFKKGDMFNLNDCHKLIDFFKDSISRYPKWSNAYDFNFSETEKYKDIAGFYREVEEQGYKVSFESASKKEVDKLVEEGKLYMFQIYNKDFSDKSHGTPNLHTMYFKLLFDENNHGQIRLSGGAELFMRRASLKKEELVVHPANSPIANKNPDNPKKTTTLSYDVYKDKRFSEDQYELHIPIANINKCPKNIFKINTEVRVLLKHDDNPYVIGIDRGERNLLYIVVVDGKGNIVEQYSLNEIINNFNGIRIKTDYHSLLDKKEKERFEARQNWTSIENIKELKAGYISQVVHKICELVEKYDAVIALEDLNSGFKNSRVKVEKQVYQKFEKMLIDKLNYMVDKKSNPCATGGALKGYQITNKFESFKSMSTQNGFIFYIPAWLTSKIDPSTGFVNLLKTKYTSIADKKFISSFDRIMYVPEEDLFEFALDYKNFSRTDADYIKKWKLYSYGNRIRIFRNPKKNNVFDWEEVCLTSAYKELFNKYGINYQQGDIRALLCEQSDKAFYSSFMALMSLMLQMRNSITGRTDVDFLISPVKNSDGIFYDSRNYEAQENAILPKNADANGAYNIARKVLWAIGQFKKAEDEKLDKVKIASNKEWLEYAQTSVKH

SEQ ID NO: 10 - protein, 1264 aa, Leptospira inadai
MEDYSGFVNIYSIQKTLRFELKPVGKTLEHIEKKGFLKKDKIRAEDYKAVKKIIDKYHRAYIEEVFDSVLHQKKKKDKTRFSTQFIKEIKEFSELYYKTEKNIPDKERLEALSEKLRKMLVGAFKGEFSEEVAEKYNKNLFSKELIRNEIEKFCETDEERKQVSNFKSFTTYFTGFHSNRQNIYSDEKKSTAIGYRIIHQNLPKFLDNLKIIESIQRRFKDFPWSDLKKNLKKIDKNIKLTEYFSIDGFVNVLNQKGIDAYNTILGGKSEESGEKIQGLNEYINLYRQKNNIDRKNPLNVKILFKQILGDRETKSFIPEAFPDDQSVLNSITEFAKYLKLDKKKKSIIAELKKFLSSFNRYELDGIYLANDNSLASISTFLFDDWSFIKKSVSFKYDESVGDPKKKIKSPLKYEKEKEKWLKQKYYTISFLNDAIESYSKSQDEKRVKIRLEAYFAEFKSKDDAKKQFDLLERIEEAYAIVEPLLGAEYPRDRNLKADKKEVGKIKDFLDSIKSLQFFLKPLLSAEIFDEKDLGFYNQLEGYYEEIDISGHLYNKVRNYLTGKIYSKEKFKLNFENSTLLKGWDENREVANLCVIFREDQKYYLGVMDKENNTILSDIPKVKPNELFYEKMVYKLIPTPHMQLPRIIFSSDNLSIYNPSKSILKIREAKSFKEGKNFKLKDCHKFIDFYKESISKNEDWSRFDFKFSKTSSYENISEFYREVERQGYNLDFKKVSKFYIDSLVEDGKLYLFQIYNKDFSIFSKGKPNLHTIYFRSLFSKENLKDVCLKLNGEAEMFFRKKSINYDEKKKREGHHPELFEKLKYPILKDKRYSEDKFQFHLPISLNFKSKERLNFNLKVNEFLKRNKDINIIGIDRGERNLLYLVMINQKGEILKQTLLDSMQSGKGRPEINYKEKLQEKEIERDKARKSWGTVENIKELKEGYLSIVIHQISKLMVENNAIVVLEDLNIGFKRGRQKVERQVYQKFEKMLIDKLNFLVFKENKPTEPGGVLKAYQLTDEFQSFEKLSKQTGFLFYVPSWNTSKIDPRTGFIDFLHPAYENIEKAKQWINKFDSIRFNSKMDWFEFTADTRKFSENLMLGKNRVWVICTTNVERYFTSKTANSSIQYNSIQITEKLKELFVDIPFSNGQDLKPEILRKNDAVFFKSLLFYIKTTLSLRQNNGKKGEEEKDFILSPVVDSKGRFFNSLEASDDEPKDADANGAYHIALKGLMNLLVLNETKEENLSRPKWKIKNKDWLEFVWERNR

SEQ ID NO: 11 - protein, 1373 aa, Moraxella bovoculi
MLFQDFTHLYPLSKTVRFELFIDRTLEHIHAKNFLSQDETMADMHQKVKVILDDYHRDFIADMMGEVKLTKLAEFYDVYLKFRKNPKDDELQKAQLKDLQAVLRKEIVKPIGNGGKYKAGYDRLFGAKLFKDGKELGDLAKFVIAQEGESSPKLAHLAHFEKFSTYFTGFHDNRKNMYSDEDKHTAIAYRLIHENLPRFIDNLQILTTIKQKHSALYDQIINELTASGLDVSLASHLDGYHKLLTQEGITAYNTLLGGISGEAGSPKIQGINELINSHHNQHCHKSERIAKLRPLHKQILSDGMSVSFLPSKFADDSEMCQAVNEFYRHYADVFAKVQSLFDGFDDHQKDGIYVEHKNLNELSKQAFGDFALLGRVLDGYYVDVVNPEFNERFAKAKTDNAKAKLTKEKDKFIKGVHSLASLEQAIEHYTARHDDESVQAGKLGQYFKHGLAGVDNPIQKIHNNHSTIKGFLERERPAGERALPKIKSGKNPEMTQLRQLKELLDNALNVAHFAKLLTTKTTLDNQDGNFYGEFGVLYDELAKIPTLYNKVRDYLSQKPFSTEKYKLNFGNPTLLNGWDLNKEKDNFGVILQKDGCYYLALLDKAHKKVFDNAPNTGKSIYQKMIYKYLEVRKQFPKVFFSKEAIAINYHPSKELVEIKDKGRQRSDDERLKLYRFILECLKIHPKYDKKFEGAIGDIQLFKKDKKGREVPISEKDLFKDINGIFSSKPKLEMEDFFIGEFKRYNPSQDLVDQYNIYKKIDSNDNRKKENFYNNHPKFKKDLVRYYYESMCKHEEWEESFEFSKKLQDIGCYVDVNELFTEIETRRLNYKISFCNINADYIDELVEQGQLYLFQIYNKDFSPKAHGKPNLHTLYFKALFSEDNLADPIYKLNGEAQIFYRKASLDMNETTIHRAGEVLENKNPDNPKKRQFVYDIIKDKRYTQKDFMLHVPITMNFGVQGMTIKEFNKKVNQSIQQYDEVNVIGIDRGERHLLYLTVINSKGEILEQCSLNDITTASANGTQMTTPYHKILDKREIERLNARVGWGEIETIKELKSGYLSHVVHQISQLMLKYNAIVVLEDLNFGFKRGRFKVEKQIYQNFENALIKKLNHLVLKDKADDEIGSYKNALQLTNNFTDLKSIGKQTGFLFYVPAWNTSKIDPETGFVDLLKPRYENIQASQAFFGKFDKICYNADKDYFEFHIDYAKFTDKAKNSRQIWTICSHGDKRYVYDKTANQNKGAAKGINVNDILKSLFARHHINEKQPNLVMDICQNNDKEFHKSLMYLLKTLLALRYSNASSDEDFILSPVANDEGVFFNSALADDTQPQNADANGAYHIALKGLWLLNELKNSDDLNKVKLAIDNQTWLNFAQNR

SEQ ID NO: 12 - protein, 1352 aa, Unknown
  Parcubacteria bacterium
MENIFDQFIGKYSLSKTLRFELKPVGKTEDFLKINKVFEKDQTIDDSYNQAKFYFDSLHQKFIDAALASDKTSELSFQNFADVLEKQNKIILDKKREMGALRKRDKNAVGIDRLQKEINDAEDIIQKEKEKIYKDVRTLFDNEAESWKTYYQEREVDGKKITESKADLKQKGADFLTAAGILKVLKYEFPEEKEKEFQAKNQPSLFVEEKENPGQKRYIFDSFDKFAGYLTKFQQTKKNLYAADGTSTAVATRIADNFIIFHQNTKVFRDKYKNNHTDLGFDEENIFEIERYKNCLLQREIEHIKNENSYNKIIGRINKKIKEYRDQKAKDTKLTKSDFPFFKNLDKQILGEVEKEKQLIEKTREKTEEDVLIERFKEFIENNEERFTAAKKLMNAFCNGEFESEYEGIYLKNKAINTISRRWFVSDRDFELKLPQQKSKNKSEKNEPKVKKFISIAEIKNAVEELDGDIFKAVFYDKKIIAQGGSKLEQFLVIWKYEFEYLFRDIERENGEKLLGYDSCLKIAKQLGIFPQEKEAREKATAVIKNYADAGLGIFQMMKYFSLDDKDRKNTPGQLSTNFYAEYDGYYKDFEFIKYYNEFRNFITKKPFDEDKIKLNFENGALLKGWDENKEYDFMGVILKKEGRLYLGIMHKNHRKLFQSMGNAKGDNANRYQKMIYKQIADASKDVPRLLLTSKKAMEKFKPSQEILRIKKEKTFKRESKNFSLRDLHALIEYYRNCIPQYSNWSFYDFQFQDTGKYQNIKEFTDDVQKYGYKISFRDIDDEYINQALNEGKMYLFEVVNKDIYNTKNGSKNLHTLYFEHILSAENLNDPVFKLSGMAEIFQRQPSVNEREKITTQKNQCILDKGDRAYKYRRYTEKKIMFHMSLVLNTGKGEIKQVQFNKIINQRISSSDNEMRVNVIGIDRGEKNLLYYSVVKQNGEIIEQASLNEINGVNYRDKLIEREKERLKNRQSWKPVVKIKDLKKGYISHVIHKICQLIEKYSAIVVLEDLNMRFKQIRGGIERSVYQQFEKALIDKLGYLVFKDNRDLRAPGGVLNGYQLSAPFVSFEKMRKQTGILFYTQAEYTSKTDPITGFRKNVYISNSASLDKIKEAVKKFDAIGWDGKEQSYFFKYNPYNLADEKYKNSTVSKEWAIFASAPRIRRQKGEDGYWKYDRVKVNEEFEKLLKVWNFVNPKATDIKQEIIKKIKAGDLQGEKELDGRLRNFWHSFIYLFNLVLELRNSFSLQIKIKAGEVIAVDEGVDFIASPVKPFFTTPNPYIPSNLCWLAVENADANGAYNIARKGVMILKKIREHAKKDPEFKKLPNLFISNAEWDEAARDWGKYAGTTALNLDH

SEQ ID NO: 13 - protein, 1260 aa, Porphyromonas crevioricanis
MDSLKDFTNLYPVSKTLRFELKPVGKTLENIEKAGILKEDEHRAESYRRVKKIIDTYHKVFIDSSLENMAKMGIENEIKAMLQSFCELYKKDHRTEGEDKALDKIRAVLRGLIVGAFTGVCGRRENTVQNEKYESLFKEKLIKEILPDFVLSTEAESLPFSVEEATRSLKEFDSFTSYFAGFYENRKNIYSTKPQSTAIAYRLIHENLPKFIDNILVFQKIKEPIAKELEHIRADFSAGGYIKKDERLEDIFSLNYYIHVLSQAGIEKYNALIGKIVTEGDGEMKGLNEHINLYNQQRGREDRLPLFRPLYKQILSDREQLSYLPESFEKDEELLRALKEFYDHIAEDILGRTQQLMTSISEYDLSRIYVRNDSQLTDISKKMLGDWNAIYMARERAYDHEQAPKRITAKYERDRIKALKGEESISLANLNSCIAFLDNVRDCRVDTYLSTLGQKEGPHGLSNLVENVFASYHEAEQLLSFPYPEENNLIQDKDNVVLIKNLLDNISDLQRFLKPLWGMGDEPDKDERFYGEYNYIRGALDQVIPLYNKVRNYLTRKPYSTRKVKLNFGNSQLLSGWDRNKEKDNSCVILRKGQNFYLAIMNNRHKRSFENKMLPEYKEGEPYFEKMDYKFLPDPNKMLPKVFLSKKGIEIYKPSPKLLEQYGHGTHKKGDTFSMDDLHELIDFFKHSIEAHEDWKQFGFKFSDTATYENVSSFYREVEDQGYKLSFRKVSESYVYSLIDQGKLYLFQIYNKDFSPCSKGTPNLHTLYWRMLFDERNLADVIYKLDGKAEIFFREKSLKNDHPTHPAGKPIKKKSRQKKGEESLFEYDLVKDRRYTMDKFQFHVPITMNFKCSAGSKVNDMVNAHIREAKDMHVIGIDRGERNLLYICVIDSRGTILDQISLNTINDIDYHDLLESRDKDRQQEHRNWQTIEGIKELKQGYLSQAVHRIAELMVAYKAVVALEDLNMGFKRGRQKVESSVYQQFEKQLIDKLNYLVDKKKRPEDIGGLLRAYQFTAPFKSFKEMGKQNGFLFYIPAWNTSNIDPTTGFVNLFHVQYENVDKAKSFFQKFDSISYNPKKDWFEFAFDYKNFTKKAEGSRSMWILCTHGSRIKNFRNSQKNGQWDSEEFALTEAFKSLFVRYEIDYTADLKTAIVDEKQKDFFVDLLKLFKLTVQMRNSWKEKDLDYLISPVAGADGRFFDTREGNKSLPKDADANGAYNIALKGLWALRQIRQTSEGGKLKLAISNKEWLQFVQERSYEKD

SEQ ID NO: 14 - protein, 1324 aa, Prevotella disiens
MENYQEFTNLFQLNKTLRFELKPIGKTCELLEEGKIFASGSFLEKDKVRADNVSYVKKEIDKKHKIFIEETLSSFSISNDLLKQYFDCYNELKAFKKDCKSDEEEVKKTALRNKCTSIQRAMREAISQAFLKSPQKKLLAIKNLIENVFKADENVQHFSEFTSYFSGFETNRENFYSDEEKSTSIAYRLVHDNLPIFIKNIYIFEKLKEQFDAKTLSEIFENYKLYVAGSSLDEVFSLEYFNNTLTQKGIDNYNAVIGKIVKEDKQEIQGLNEHINLYNQKHKDRRLPFFISLKKQILSDREALSWLPDMFKNDSEVIDALKGFYIEDGFENNVLTPLATLLSSLDKYNLNGIFIRNNEALSSLSQNVYRNFSIDEAIDAQNAELQTFNNYELIANALRAKIKKETKQGRKSFEKYEEYIDKKVKAIDSLSIQEINELVENYVSEFNSNSGNMPRKVEDYFSLMRKGDFGSNDLIENIKTKLSAAEKLLGTKYQETAKDIFKKDENSKLIKELLDATKQFQHFIKPLLGTGEEADRDLVFYGDFLPLYEKFEELTLLYNKVRNRLTQKPYSKDKIRLCFNKPKLMTGWVDSKTEKSDNGTQYGGYLFRKKNEIGEYDYFLGISSKAQLFRKNEAVIGDYERLDYYQPKANTIYGSAYEGENSYKEDKKRLNKVIIAYIEQIKQTNIKKSIIESISKYPNISDDDKVTPSSLLEKIKKVSIDSYNGILSFKSFQSVNKEVIDNLLKTISPLKNKAEFLDLINKDYQIFTEVQAVIDEICKQKTFIYFPISNVELEKEMGDKDKPLCLFQISNKDLSFAKTFSANLRKKRGAENLHTMLFKALMEGNQDNLDLGSGAIFYRAKSLDGNKPTHPANEAIKCRNVANKDKVSLFTYDIYKNRRYMENKFLFHLSIVQNYKAANDSAQLNSSATEYIRKADDLHIIGIDRGERNLLYYSVIDMKGNIVEQDSLNIIRNNDLETDYHDLLDKREKERKANRQNWEAVEGIKDLKKGYLSQAVHQIAQLMLKYNAIIALEDLGQMFVTRGQKIEKAVYQQFEKSLVDKLSYLVDKKRPYNELGGILKAYQLASSITKNNSDKQNGFLFYVPAWNTSKIDPVTGFTDLLRPKAMTIKEAQDFFGAFDNISYNDKGYFEFETNYDKFKIRMKSAQTRWTICTFGNRIKRKKDKNYWNYEEVELTEEFKKLFKDSNIDYENCNLKEEIQNKDNRKFFDDLIKLLQLTLQMRNSDDKGNDYIISPVANAEGQFFDSRNGDKKLPLDADANGAYNIARKGLWNIRQIKQTKNKDDLNLSISSTEWLDFVREKPYLK

SEQ ID NO: 15 - protein, 1484 aa, Unknown
  Peregrinibacteria bacterium
  misc_feature (1073)..(1073): Xaa can be any naturally occurring amino acid
MSNFFKNFTNLYELSKTLRFELKPVGDTLTNMKDHLEYDEKLQTFLKDQNIDDAYQALKPQFDEIHEEFITDSLESKKAKEIDFSEYLDLFQEKKELNDSEKKLRNKIGETFNKAGEKWKKEKYPQYEWKKGSKIANGADILSCQDMLQFIKYKNPEDEKIKNYIDDTLKGFFTYFGGFNQNRANYYETKKEASTAVATRIVHENLPKFCDNVIQFKHIIKRKKDGTVEKTERKTEYLNAYQYLKNNNKITQIKDAETEKMIESTPIAEKIFDVYYFSSCLSQKQIEEYNRIIGHYNLLINLYNQAKRSEGKHLSANEKKYKDLPKFKTLYKQIGCGKKKDLFYTIKCDTEEEANKSRNEGKESHSVEEIINKAQEAINKYFKSNNDCENINTVPDFINYILTKENYEGVYWSKAAMNTISDKYFANYHDLQDRLKEAKVFQKADKKSEDDIKIPEAIELSGLFGVLDSLADWQTTLFKSSILSNEKLKIITDSQTPSEALLKMIFNDIEKNMESFLKETNDIITLKKYKGNKEGTEKIKQWFDYTLAINRMLKYFLVKENKIKGNSLDTNISEALKTLIYSDDAEWFKWYDALRNYLTQKPQDEAKENKLKLNFDNPSLAGGWDVNKECSNFCVILKDKNEKKYLAMIKKGENTLFQKEWTEGRGKNLTKKSNPLFEINNCEILSKMEYDFWADVSKMIPKCSTQLKAVVNHFKQSDNEFIFPIGYKVTSGEKFREECKISKQDFELNNKVFNKNELSVTAMRYDLSSTQEKQYIKAFQKEYWELLFKQEKRDTKLTNNEIFNEWINFCNKKYSELLSWERKYKDALTNWINFCKYFLSKYPKTTLFNYSFKESENYNSLDEFYRDVDICSYKLNINTTINKSILDRLVEEGKLYLFEIKNQDSNDGKSIGHKNNLHTIYWNAIFENFDNRPKLNGEAEIFYRKAISKDKLGIVKGKKTKNGTWIIKNYRFSKEKFILHVPITLNFCSNNEYVNDIVNTKFYNFSNLHFLGIDRGEKHLAYYSLVNKNGEIVDQGTLNLPFTDKDGNQRSIKKEKYFYNKQEDKWEAKEVDXWNYNDLLDAMASNRDMARKNWQRIGTIKEAKNGYVSLVIRKIADLAVNNERPAFIVLEDLNTGFKRSRQKIDKSVYQKFELALAKKLNFLVDKNAKRDEIGSPTKALQLTPPVNNYGDIENKKQAGIMLYTRANYTSQTDPATGWRKTIYLKAGPEETTYKKDGKIKNKSVKDQIIETFTDIGFDGKDYYFEYDKGEFVDEKTGEIKPKKWRLYSGENGKSLDRFRGEREKDKYEWKIDKIDIVKILDDLFVNFDKNISLLKQLKEGVELTRNNEHGTGESLRFAINLIQQIRNTGNNERDNDFILSPVRDENGKHFDSREYWDKETKGEKISMPSSGDANGAFNIARKGIIMNAHILANSDSKDLSLFVSDEEWDLHLNNKTEWKKQLNIFSSRKAMAKRKKKRPAATKK

SEQ ID NO: 16 - protein, 1245 aa, Porphyromonas macacae
MKTQHFFEDFTSLYSLSKTIRFELKPIGKTLENIKKNGLIRRDEQRLDDYEKLKKVIDEYHEDFIANILSSFSFSEEILQSYIQNLSISEARAKIEKTMRDTLAKAFSEDERYKSIFKKELVKKDIPVWCPAYKSLCKKFDNFTTSLVPFHENRKNLYTSNEITASIPYRIVHVNLPKFIQNIEALCELQKKMGADLYLEMMENLRNVWPSFVKTPDDLCNLKTYNHLMVQSSISEYNRFVGGYSTEDGTKHQGINEWINIYRQRNKEMRLPGLVFLHKQILAKVDSSSFISDTLENDDQVFCVLRQFRKLFWNTVSSKEDDAASLKDLFCGLSGYDPEAIYVSDAHLATISKNIFDRWNYISDAIRRKTEVLMPRKKESVERYAEKISKQIKKRQSYSLAELDDLLAHYSEESLPAGFSLLSYFTSLGGQKYLVSDGEVILYEEGSNIWDEVLIAFRDLQVILDKDFTEKKLGKDEEAVSVIKKALDSALRLRKFFDLLSGTGAEIRRDSSFYALYTDRMDKLKGLLKMYDKVRNYLTKKPYSIEKFKLHFDNPSLLSGWDKNKELNNLSVIFRQNGYYYLGIMTPKGKNLFKTLPKLGAEEMFYEKMEYKQIAEPMLMLPKVFFPKKTKPAFAPDQSVVDIYNKKTFKTGQKGFNKKDLYRLIDFYKEALTVHEWKLFNFSFSPTEQYRNIGEFFDEVREQAYKVSMVNVPASYIDEAVENGKLYLFQIYNKDFSPYSKGIPNLHTLYWKALFSEQNQSRVYKLCGGGELFYRKASLHMQDTTVHPKGISIHKKNLNKKGETSLFNYDLVKDKRFTEDKFFFHVPISINYKNKKITNVNQMVRDYIAQNDDLQHGIDRGERNLLYISRIDTRGNLLEQFSLNVIESDKGDLRTDYQKILGDREQERLRRRQEWKSIESIKDLKDGYMSQVVHKICNMVVEHKAIVVLENLNLSFMKGRKKVEKSVYEKFERMLVDKLNYLVVDKKNLSNEPGGLYAAYQLTNPLFSFEELHRYPQSGILFFVDPWNTSLTDPSTGFVNLLGRINYTNVGDARKFFDRFNAIRYDGKGNILFDLDLSRFDVRVETQRKLWTLTTFGSRIAKSKKSGKWMVERIENLSLCFLELFEQFNIGYRVEKDLKKAILSQDRKEFYVRLIYLFNLMMQIRNSDGEEDYILSPALNEKNLQFDSRLIEAKDLPVDADANGAYNVARKGLMVVQRIKRGDHESIHRIGRAQWLRYVQEGIVE

SEQ ID NO: 17 - protein, 1250 aa, Smithella sp.
MQTLFENFTNQYPVSKTLRFELIPQGKTKDFIEQKGLLKKDEDRAEKYKKVKNIIDEYHKDFIEKSLNGLKLDGLEKYKTLYLKQEKDDKDKKAFDKEKENLRKQIANAFRNNEKFKTLFAKELIKNDLMSFACEEDKKNVKEFEAFTTYFTGFHQNRANMYVADEKRTAIASRLIHENLPKFIDNIKIFEKMKKEAPELLSPFNQTLKDMKDVIKGTTLEEIFSLDYFNKTLTQSGIDIYNSVIGGRTPEEGKTKIKGLNEYINTDFNQKQTDKKKRQPKFKQLYKQILSDRQSLSFIAEAFKNDTEILEAIEKFYVNELLHFSNEGKSTNVLDAIKNAVSNLESFNLTKMYFRSGASLTDVSRKVFGEWSIINRALDNYYATTYPIKPREKSEKYEERKEKWLKQDFNVSLIQTAIDEYDNETVKGKNSGKVIADYFAKFCDDKETDLIQKVNEGYIAVKDLLNTPCPENEKLGSNKDQVKQIKAFMDSIMDIMHFVRPLSLKDTDKEKDETFYSLFTPLYDHLTQTIALYNKVRNYLTQKPYSTEKIKLNFENSTLLGGWDLNKETDNTAIILRKDNLYYLGIMDKRHNRIFRNVPKADKKDFCYEKMVYKLLPGANKMLPKVFFSQSRIQEFTPSAKLLENYANETHKKGDNFNLNHCHKLIDFFKDSINKHEDWKNFDFRFSATSTYADLSGFYHEVEHQGYKISFQSVADSFIDDLVNEGKLYLFQIYNKDFSPFSKGKPNLHTLYWKMLFDENNLKDVVYKLNGEAEVFYRKKSIAEKNTTIHKANESIINKNPDNPKATSTFNYDIVKDKRYTIDKFQFHIPITMNFKAEGIFNMNQRVNQFLKANPDINIIGIDRGERHLLYYALINQKGKILKQDTLNVIANEKQKVDYHNLLDKKEGDRATARQEWGVIETIKELKEGYLSQVIHKLTDLMIENNAIIVMEDLNFGFKRGRQKVEKQVYQKFEKMLIDKLNYLVDKNKKANELGGLLNAFQLANKFESFQKMGKQNGFIFYVPAWNTSKTDPATGFIDFLKPRYENLNQAKDFFEKFDSIRLNSKADYFEFAFDFKNFTEKADGGRTKWTVCTTNEDRYQWNRALNNNRGSQEKYDITAELKSLFDGKVDYKSGKDLKQQIASQESADFFKALMKNLSITLSLRHNNGEKGDNEQDYILSPVADSKGRFFDSRKADDDMPKNADANGAYHIALKGLWCLEQISKTDDLKKVKLAISNKEWLEFVQTLKG

SEQ ID NO: 18 - DNA, 3987 bp, Artificial
  Synthetic Cas12a polynucleotide
atggccgggagcaagaagcgccggataaagcaggacacgcagttcgagggcttcaccaacctgtaccaagtctccaagacgctccggttcgagcttatcccgcaagggaagaccctgaaacacatccaggaacaaggtttcatcgaggaggacaaggcccgcaacgaccactacaaggagctcaagcccataatcgatcggatctacaagacgtacgccgaccagtgcctccaactggtgcagctcgactgggagaacctgagcgccgccattgacagctaccgcaaggaaaagacggaggagacgcgcaacgcccttattgaggagcaagccacctaccgcaacgccatccacgactacttcatcgggcgcaccgacaacctgacggacgcgatcaacaagcgccacgcggaaatctacaagggccttttcaaggccgagctcttcaacgggaaggtcctaaaacagctcgggactgtcacgacaaccgagcatgagaacgccctccttcgcagcttcgacaagttcaccacatacttctcgggcttctaccggaaccgcaagaacgttttcagcgccgaggacatctccaccgccatcccgcacaggatcgtccaggacaacttccccaagttcaaggagaactgccacatcttcacgcgcctgattacagccgtaccttcacttcgtgagcacttcgagaacgtcaaaaaggccatcgggatcttcgtctccacgtccatcgaggaggtattctctttcccgttctataaccagctcctgacccagacgcagatcgacctctacaaccagctactgggcggcatcagccgggaggccgggaccgagaaaataaagggcctcaacgaagttctcaacctggccatccagaagaacgacgagaccgcgcatatcatcgcatccctgccgcatcgcttcattcctttgttcaagcagatattgagcgaccggaacaccctctcgttcatcctcgaagaattcaagagcgacgaggaggtcattcagtctttctgcaagtacaagacgctcctacggaatgagaatgtgctggagaccgcggaggcactcttcaatgagctgaactccattgacctgacccacatcttcattagccacaagaaactggagacgatctccagcgccctgtgcgaccactgggacactctccgcaacgccctctacgaacgccggatctccgaacttaccggcaagataactaagtcggctaaggagaaggtgcaacggagcctcaagcacgaggacatcaaccttcaggaaatcatctcagccgcgggcaaggagctgagcgaggcgtttaagcagaaaacatcggagatactgagccacgcgcacgcggccctggatcaaccgctgccgacgactctcaagaagcaagaggagaaggaaatccttaagtcccagctcgactcgctgctcggcctctatcacttgctcgactggttcgcggttgatgagtccaacgaggtggacccggagttctccgcgcgcctcacgggtattaagctggagatggagccaagcttaagcttctacaacaaggcccgcaactacgcgaccaaaaaaccgtactcagtcgagaaattcaagctgaatttccagatgcctacattggcgagggggtgggacgtgaaccgcgagaagaacaatggagccatcctgttcgtcaaaaatgggttgtactacctgggcatcatgcccaagcagaagggccgttacaaggccctgtcattcgagcctaccgagaagacctcggagggcttcgacaagatgtactacgactatttcccggacgccgccaagatgatcccgaagtgctccacgcagctcaaagccgtcacggcccacttccagacgcataccacgccgatacttctgagcaacaacttcattgagccgctagagatcacgaaggagatatacgacctaaacaaccccgaaaaggagcccaagaagttccagacagcctacgctaagaagacaggtgatcagaagggatatagggaggcactctgcaagtggatcgacttcacgcgcgacttcctgtcgaaatatacaaagacgaccagcattgacctaagttctctccgcccatcctcccagtacaaggatctgggcgagtattatgcggagctgaacccattgctgtaccacatcagcttccagaggatcgccgagaaggagattatggacgcggtggagacggggaaactatacctgttccaaatatataacaaggacttcgctaaagggcaccacgggaagcccaacctgcacacactctactggacgggcttgttttcgccagaaaatttggccaagacttcgatcaagctcaacggccaggcggagttgttttaccgtcccaagtctcgcatgaagcgcatggcgcatcgcctcggagagaaaatgcttaacaagaagctcaaggatcagaagacgcccatacctgatacgttgtaccaggaattgtacgactacgtgaaccaccgcctatcgcacgacctctcagacgaggcccgcgccctcctcccaaacgtgattactaaggaggtttcccatgaaataatcaaggaccgacggttcaccagcgacaaattttttttccacgtgcctatcacgctcaattaccaggcggccaactccccatcgaagttcaaccagcgcgtgaacgcctaccttaaggagcacccggagaccccaatcatcgggatcgaccgtggcgagcggaacctgatctatattacggtgatcgatagcaccgggaagatcctggagcagcgctccctgaacacaatccagcagtttgactaccagaagaaactcgacaaccgggagaaggagcgcgtcgcagcccggcaagcatggagtgtggtcggcaccataaaggacctgaaacagggttacctaagtcaagttatccacgagatcgttgacctgatgatacactatcaagccgtagtcgtgctggagaacctcaacttcgggtttaagtccaagcgcaccggcatcgcggagaaggcggtgtaccagcagttcgagaagatgctgatcgacaagctgaactgcctggtgctcaaggactaccctgcggagaaggtcggcggggtcttgaacccgtaccagctaaccgaccagttcacgagcttcgccaaaatgggcacgcagtccggattcttgttttatgtcccggctccatatacaagtaagatcgacccgctgacagggtttgttgacccattcgtgtggaagaccatcaagaaccacgagagcaggaaacacttcttagagggcttcgacttcctgcattacgacgttaagacaggcgacttcatcctgcacttcaagatgaaccgcaacctgtcgttccagaggggcctgcccggcttcatgcccgcctgggatatcgtctttgagaagaatgagacgcagttcgacgcgaaggggacgccgttcatcgctggaaagcggatcgtgccggtcatcgagaaccaccgcttcacgggtcgctaccgagatttataccccgccaacgaactaattgcgctgctggaggagaaggggatcgtgttccgagatggcagcaacattctcccgaagctgctggagaacgacgactcgcacgctattgacacgatggtcgccctcatacggagcgtgcttcagatgcggaacagtaacgctgccacgggcgaggactacattaactcccccgtccgcgacctcaacggggtctgcttcgatagccgcttccagaacccggagtggcctatggatgcggacgcgaacggggcctaccacatcgccctcaagggccaactcctgctcaaccacttgaaggaaagcaaagacctcaaattgcagaatggcatcagtaaccaggactggctcgcgtacatccaggaactgagaaacgggtccaagaagcggcgtatcaagcaagattga

SEQ ID NO: 19 - DNA, 3987 bp, Artificial
  Synthetic Cas12a polynucleotide
atggcgggaagcaaaaagcgccggattaagcaagacacgcagttcgagggcttcacgaacctctaccaagtcagcaagaccctccggttcgagctgataccacagggaaagacgctcaagcacatccaggaacagggcttcatcgaggaggacaaggcgcgcaacgaccactacaaggagttgaaaccgatcatcgaccgcatctacaagacgtacgccgaccagtgcctccagctcgtgcagctcgactgggagaacctctccgccgccattgactcgtaccggaaggagaagactgaggagacccgcaacgccctgatcgaggagcaagcaacctaccggaacgccatccacgactacttcatcggccgcaccgacaacctcaccgacgcgatcaacaagcggcacgcggagatatacaaagggctgttcaaggcggagctgttcaacggcaaggtgctcaagcagctagggacggtgaccacgaccgagcacgagaacgcgctcctccgcagcttcgacaagttcaccacctacttcagcggcttctaccggaaccgcaagaatgtgttcagcgcggaggacatcagcacggccatcccgcaccgcatcgtccaggacaacttcccgaagttcaaggagaactgccacatcttcacccgcctgataaccgccgtcccctccctgcgggagcacttcgagaacgtcaaaaaggcaattgggatcttcgtctcgaccagcattgaggaggtgttcagcttccccttctacaaccagctcctcacccagacgcagatcgacctgtacaatcagttgctcggcgggataagccgcgaggcgggaaccgaaaaaatcaaggggctgaacgaagtgttgaacctcgccatccagaagaacgacgagaccgcgcacatcatcgcctccctgccccaccggttcatcccgctgttcaagcagatcctctctgaccggaacaccctgtccttcattcttgaggagttcaagtcggacgaggaggtcatccagagcttctgcaagtacaagacgctgctacggaacgagaacgtgctggagacggcggaggcactgttcaacgagctaaacagcatcgacctcacgcacatcttcatcagtcacaagaaactggagaccatctcctccgcgctgtgcgaccactgggacacgctcaggaacgcgctctacgagcgccgaatcagtgagctgacgggcaagatcacgaagtccgcgaaggagaaggtgcagcggtccctcaagcacgaggacatcaacctccaggagatcatctcagcggctgggaaagagctgtccgaggcgttcaagcagaaaacgagcgaaatcctgtcccacgcgcacgcggccctggatcagcctctgccgacgaccctcaagaaacaagaagaaaaggaaatcctcaagtcgcagctcgactcgctgctgggcctgtaccatctcctcgactggttcgccgtggacgagagcaacgaggtggaccccgagttctccgcgcggcttacggggatcaagctggagatggagcccagcctgtccttctacaacaaggcgcgcaactacgccaccaagaagccctacagcgtggagaagttcaagctcaacttccagatgcccactctcgcacgtgggtgggacgtcaaccgcgaaaaaaataatggggcgatcctgttcgtcaagaacggcctgtactacttgggcatcatgccgaaacagaagggccgctacaaggccctgagcttcgaaccgaccgagaaaacgagcgaggggttcgacaagatgtactacgactacttccccgacgccgcgaagatgattccaaagtgctccacgcagcttaaggccgtgacggcccacttccagacgcacacgaccccgatcctcctcagcaacaacttcatcgagcccctggagatcacgaaggagatatacgacctgaacaacccggagaaggagcccaagaaattccagaccgcctacgccaagaagacaggcgaccaaaagggttacagggaggccctctgcaagtggatcgacttcactagggacttcctgtccaagtacaccaagactacctctatcgacctgtccagcctccgcccgtcgtcccagtacaaagatttgggcgagtattacgcggagctgaacccactgctctaccacatcagcttccagcgcatcgcggagaaggagatcatggacgcagtggagacgggcaagctatacctatttcagatatacaacaaagacttcgctaagggacaccacggcaagcctaacctgcacaccctctactggacggggctcttcagcccggagaacctcgccaagacctcgatcaagctcaacggccaggccgagctgttctaccggcccaagtcccgcatgaagcggatggcccaccggctcggggagaaaatgctcaacaagaaattgaaggaccaaaaaacgccgatacccgacaccctataccaggagctgtacgactatgtgaaccaccgcctgagccacgacctcagcgacgaggcgcgggccctcctgccgaacgtcatcacaaaggaggtcagccacgagatcatcaaggaccggcgcttcacctccgacaagtttttctttcacgtgcccatcacgctcaactaccaggccgccaactcgccgtccaagttcaaccagcgcgtgaacgcctacctcaaggagcaccccgagaccccgatcatcgggattgaccgaggggagcggaacctcatctacatcaccgtcatcgacagcaccgggaagatccttgaacagcggtcgctcaacaccatccagcagttcgactaccagaagaaactcgacaaccgggagaaggagagagtggcggcccgccaggcttggtccgtcgtcgggacgattaaggacttgaaacaaggttacctgtcgcaagtgatccacgagatcgttgacctgatgatccactaccaagccgtcgtggtcctggagaacctcaacttcggcttcaagagcaaacgaaccggcatcgcggagaaggccgtgtaccagcagttcgaaaaaatgctgatcgacaagctgaactgcctcgtgctcaaggactaccccgctgagaaggtcggcggggtgctgaacccgtaccagctcactgaccagttcaccagcttcgcaaagatgggcacccagtccggcttcctgttctacgtgcctgcgccatacacctcgaagatcgacccgctcaccgggttcgtggaccccttcgtctggaagaccatcaagaaccacgagagccgcaagcacttcctggagggcttcgacttcctccactacgacgtcaagaccggggacttcatcctgcacttcaagatgaaccgcaacctcagtttccagcgcggcctgccggggttcatgcccgcttgggatatagtcttcgagaagaatgagacgcagttcgacgcgaagggcaccccgttcatcgccgggaagcgcatcgtgccggtcatcgagaaccaccggttcaccgggcgctaccgcgacctatacccggcgaacgagttgatcgccctcctggaggagaagggcatcgtgttccgcgacggctccaacatcctcccgaagctgctcgaaaacgacgactcccacgccatcgacacgatggtcgcgctgatccggtcggtgctccagatgcggaactccaacgccgcgacgggcgaggactacatcaacagtccggtccgcgatctgaacggcgtctgcttcgactcccggttccagaaccccgagtggccgatggacgcggacgcgaacggcgcataccacatcgccctaaaagggcaattgctgctcaaccacctcaaggaatccaaagacctaaagctccagaacggcatctccaaccaggactggctggcgtacatccaggaactgcggaacgggagcaaaaaacgtcggatcaagcaagattga

SEQ ID NO: 20 - DNA, 3987 bp, Artificial
  Synthetic Cas12a polynucleotide
atggcgggctccaagaaacgccggattaagcaagatacccagttcgaggggttcacgaacctctaccaagtgagcaagaccctccgattcgaactgattcctcaggggaagaccctcaagcacatccaggagcaagggttcatcgaggaggacaaggcgcggaacgaccactacaaggaactcaaacccatcatcgaccgcatctacaagacctacgccgatcagtgcctccagctcgtgcagttggactgggagaacctcagcgcggccattgactcctaccggaaggagaaaacggaggagacgcgcaacgcgctcatcgaggaacaggcaacctatcgcaacgccatccacgactacttcatcgggaggactgacaacctcactgacgcgattaacaagcgccacgcggagatatacaagggactcttcaaagcggagctgtttaacggcaaggttctcaagcaactcggcactgtgaccacgaccgagcatgagaacgccctgctccgctccttcgacaagttcaccacctacttctccgggttctaccgcaaccgcaagaatgtcttcagcgcggaggacatcagcacggccattccacatcgaatcgtccaagataacttcccgaagttcaaggagaactgccacatcttcacccgactcattactgctgtaccgtcgttacgcgaacacttcgagaacgtcaagaaggcaattggaatcttcgtctctacgtcaatagaggaggtgttcagcttccctttctacaaccagctccttacgcagacccagatagacctgtacaatcagctcctcggtgggatcagccgggaggcggggactgagaagattaaagggctcaacgaggtcttgaacctggccatccaaaaaaacgatgagacggcgcacatcatcgcctcgctgccccaccggttcatcccgctgttcaagcagatcctcagtgacaggaacaccttgagctttatcctagaggagttcaagagcgacgaggaggtgatccagagcttctgcaagtacaaaaccctgctgaggaacgagaacgtcctggagacggcggaggcgctgttcaacgagctgaactctatcgacttaactcacatattcatctcgcacaagaagctggagactattagctctgcactctgcgaccactgggacaccctccgcaacgcgctctacgagcgccgcatctcggagctgaccgggaagatcaccaaatccgcgaaggaaaaggtccagcgttccctcaaacacgaggatattaacttacaggagattatctcagcggctgggaaggagttgtcagaggcgttcaagcagaaaacttccgagatcctgagccacgcgcacgcagcgctcgaccagcctctgcccaccaccctcaaaaagcaggaagaaaaagagatcctcaagagccagttggactccctgctggggctctatcaccttctcgactggttcgccgtcgatgagtcgaacgaggtggaccccgagttctccgcccggctgaccggcatcaagctagagatggagccgtccctcagcttctacaataaggcccgcaactacgcgaccaaaaaaccctacagcgtggagaagttcaagctgaacttccagatgccgaccttagcacgcggttgggacgtaaacagggagaagaacaatggagccatcctgttcgtcaagaacgggctttactacctcgggataatgcccaagcagaagggccgctacaaggccctttccttcgagccgacggagaaaacctccgaggggttcgacaagatgtactacgactacttccccgacgccgccaagatgatcccgaagtgctcaacgcagctaaaagccgtgaccgcccacttccagacccacacgacgccgatcctgctgagcaacaacttcatcgagccccttgagatcactaaggagatatacgacctgaacaaccccgagaaggagcccaagaagtttcaaaccgcctacgccaaaaaaactggcgaccaaaagggctacagggaggcgctgtgtaagtggatcgacttcacacgcgacttcctttcgaagtatacgaagacaacctctattgacctgagcagcctgcgtcctagctcccagtacaaagatttgggcgagtactacgcggagcttaatccactactctaccacatctcattccagcgcatcgctgagaaggaaatcatggacgcggtggagacaggcaaactgtacctcttccagatatacaacaaagacttcgctaaggggcaccacgggaagcccaaccttcatacgctctactggacgggcctattcagccccgaaaatctggccaagacctccatcaagctgaacggccaagcggagctgttctacagacccaagagccggatgaagcggatggcccacaggctcggcgagaaaatgcttaacaaaaagttgaaggaccagaaaacccctatccccgacaccctctaccaggaactgtacgactacgtgaaccacaggctctcgcacgacctttccgacgaggcccgtgccctactcccgaacgtcattaccaaagaggtttcgcacgagatcatcaaggaccggcggttcacgagcgacaagtttttctttcacgtccccatcacccttaactaccaggcggccaactccccatccaagttcaaccagcgtgtgaatgcctacctcaaggagcacccagagaccccgatcattgggatcgaccggggcgagcggaacctgatctacatcaccgtcatcgactcgacgggcaagattcttgagcagagatcgttgaataccatacagcagttcgactaccagaagaaactcgacaaccgcgagaaggagcgcgtggcggcccgccaggcgtggtccgtcgttgggacgattaaggacttgaaacaaggttatctgtcccaagtcatccacgagatcgttgatctgatgatccactatcaggcagtggtggtgctggagaatctcaacttcggcttcaagagtaagcggacgggaatcgccgagaaggccgtgtaccagcagttcgagaagatgctgatcgacaagctcaactgccttgtgctgaaagactacccggccgagaaggtcggcggcgtcctcaacccgtaccaacttaccgaccagttcacctccttcgccaagatgggcactcagtccgggttcttgttctacgtccccgcaccttacacctctaagatcgaccctctgactggcttcgtagatccattcgtgtggaagaccattaagaaccacgagagccgcaagcacttcctggagggcttcgacttcctgcactacgacgtgaagaccggggacttcatccttcacttcaagatgaaccggaacctcagcttccagcggggcctgccggggttcatgcccgcctgggacatcgtgttcgagaagaacgagacccagttcgacgcgaagggcacgcccttcatcgccgggaagcgtatcgtgccggtgatcgagaaccatcgtttcacgggtcgctaccgtgacctctacccggcgaacgagcttatcgcactcctggaggagaagggcatcgtcttccgggacggctccaacatcctcccgaaactgctggaaaacgacgactctcacgccatcgacacgatggtggccctcatccggtccgtgctccaaatgcggaacagcaacgccgccaccggtgaggactacatcaacagcccggtccgggatctgaacggggtgtgcttcgattcgcggttccagaatcctgagtggccgatggacgcggatgcaaacggggcgtaccacatcgcgctcaagggccagttacttctgaaccaccttaaggagtctaaagatttgaaactccagaacgggatctcgaaccaggactggctggcctacatccaagagttgcggaacggcagcaagaagcggcggattaagcaagattag

SEQ ID NO: 21 - DNA, 1592 bp, Medicago truncatula
actgttaataatttttaaacgtcagcgcactaaaaaaacgaaaagacggacacgtgaaaataaaaaacacacactagtttatgacgcaatactattttacttatgatttgggtacattagacaaaaccgtgaaagagatgtatcagctatgaaacctgtatacttcaatacagagacttactcatatcggatacgtacgcacgaagtatcatattaattattttaatttttaataaatattttatcggatacttatgtgatactctacatatacacaaggatatttctaagatactttatagatacgtatcctagaaaaacatgaagagtaaaaaagtgagacaatgttgtaaaaattcattataaatgtatatgattcaattttagatatgcatcagtataattgattctcgatgaaacacttaaaattatatttcttgtggaagaacgtagcgagagaggtgattcagttagacaacattaaataaaattaatgttaagttcttttaatgatgtttctctcaatatcacatcatatgaaaatgtaatatgatttataagaaaatttttaaaaaatttattttaataatcacatgtactattttttaaaaattgtatcttttataataatacaataataaagagtaatcagtgttaatttttcttcaaatataagttttattataaatcattgttaacgtatcataagtcattaccgtatcgtatcttaatttttttttaaaaaccgctaattcacgtacccgtattgtattgtacccgcacctgtatcacaatcgatcttagttagaagaattgtctcgaggcggtgcaagacagcatataatagacgtggactctcttataccaaacgttgtcgtatcacaaagggttaggtaacaagtcacagtttgtccacgtgtcacgttttaattggaagaggtgccgttggcgtaatataacagccaatcgatttttgctataaaagcaaatcaggtaaactaaacttcttcattcttttcttccccatcgctacaaaaccggttcctttggaaaagagattcattcaaacctagcacccaattccgtttcaaggtataatctactttctattcttcgattattttattattattagctactatcgtttaatcgatcttttcttttgatccgtcaaatttaaattcaattagggttttgttcttttctttcatctgattgaaatccttctgaattgaaccgtttacttgattttactgtttattgtatgatttaatcctttgtttttcaaagacagtctttagattgtgattaggggttcatataaatttttagatttggatttttgtattgtatgattcaaaaaatacgtcctttaattagattagtacatggatattttttacccgatttattgattgtcagggagaatttgatgagcaagtttttttgatgtctgttgtaaattgaattgattataattgctgatctgctgcttccagttttcataacccatattcttttaaccttgttgtacacacaatgaaaaattggtgattgattcatttgtttttctttgttttggattatacagg

SEQ ID NO: 22 - DNA, 2000 bp, Zea mays
gtcgtgcccctctctagagataaagagcattgcatgtctaaagtataaaaaattaccacatatttttttgtcacacttatttgaagtgtagtttatctatctctatacatatatttaaacttcactctacaaataatatagtctataatactaaaataatattagtgttttagaggatcatataaataaactgctagacatggtctaaaggataattgaatattttgacaatctacagttttatctttttagtgtgcatgtgatctctctgttttttttgcaaatagcttgacctatataatacttcatccattttattagtacatccatttaggatttagggttgatggtttctatagactaatttttagtacatccattttattctttttagtctctaaattttttaaaactaaaactctattttagttttttatttaataatttagatataaaatgaaataaaataaattgactacaaataaaacaaataccctttaagaaataaaaaaactaagcaaacatttttcttgtttcgagtagataatgacaggctgttcaacgccgtcgacgagtctaacggacaccaaccagcgaaccagcagcgtcgcgtcgggccaagcgaagcagacggcacggcatctctgtagctgcctctggacccctctcgagagttccgctccaccgttggacttgctccgctgtcggcatccagaaattgcgtggcggagcggcagacgtgaggcggcacggcaggcggcctcttcctcctctcacggcaccggcagctacgggggattcctttcccaccgctccttcgctttcccttcctcgcccgccgtaataaatagacaccccctccacaccctctttccccaacctcgtgttcgttcggagcgcacacacacgcaaccagatctcccccaaatccagccgtcggcacctccgcttcaaggtacgccgctcatcctccccccccccctctctctaccttctctagatcggcgatccggtccatggttagggcccggtagttctacttctgttcatgtttgtgttagagcaaacatgttcatgttcatgtttgtgatgatgtggtctggttgggcggtcgttctagatcggagtaggatactgtttcaagctacctggtggatttattaattttgtatctgtatgtgtgtgccatacatcttcatagttacgagtttaagatgatggatggaaatatcgatctaggataggtatacatgttgatgcgggttttactgatgcatatacagagatgctttttttctcgcttggttgtgatgatatggtctggttgggcggtcgttctagatcggagtagaatactgtttcaaactacctggtggatttattaaaggataaagggtcgttctagatcggagtagaatactgtttcaaactacctggtggatttattaaaggatctgtatgtatgtgcctacatcttcatagttacgagtttaagatgatggatggaaatatcgatctaggataggtatacatgttgatgcgggttttactgatgcatatacagagatgctttttttcgcttggttgtgatgatgtggtctggttgggcggtcgttctagatcggagtagaatactgtttcaaactacctggtggatttattaattttgtatctttatgtgtgtgccatacatcttcatagttacgagtttaagatgatggatggaaatattgatctaggataggtatacatgttgatgtgggttttactgatgcatatacatgatggcatatgcggcatctattcatatgctctaaccttgagtacctatctattataataaacaagtatgttttataattattttgatcttgatatacttggatgatggcatatgcagcagctatatgtggattttttagccctgccttcatacgctatttatttgcttggtactgtttcttttgtccgatgctcaccctgttgtttggtgatacttc

SEQ ID NO: 23 - protein, 24 aa, Artificial
  Synthetic GCN4 sequence
EELLSKNYHLENEVARLKKGSGSG

SEQ ID NO: 24 - protein, 241 aa, Artificial
  Synthetic GCN4 sequence
EEELLSKNYHLENEVARLKKGSGSGEELLSKNYHLENEVARLKKGSGSGEELLSKNYHLENEVARLKKGSGSGEELLSKNYHLENEVARLKKGSGSGEELLSKNYHLENEVARLKKGSGSGEELLSKNYHLENEVARLKKGSGSGEELLSKNYHLENEVARLKKGSGSGEELLSKNYHLENEVARLKKGSGSGEELLSKNYHLENEVARLKKGSGSGEELLSKNYHLENEVARLKKGSGSG

SEQ ID NO: 25 - protein, 277 aa, Artificial
  Synthetic ScFv antibody
MGPDIVMTQSPSSLSASVGDRVTITCRSSTGAVTTSNYASWVQEKPGKLFKGLIGGTNNRAPGVPSRFSGSLIGDKATLTISSLQPEDFATYFCALWYSNHWVFGQGTKVELKRGGGGSGGGGSGGGGSSGGGSEVKLLESGGGLVQPGGSLKLSCAVSGFSLTDYGVNWVRQAPGRGLEWIGVIWGDGITDYNSALKDRFIISKDNGKNTVYLQMSKVRSDDTALYYCVTGLFDYWGQGTLVTVSSYPYDVPDYAGGGGGSGGGGSGGGGSGGGGS

SEQ ID NO: 26 - DNA, 66 bp, Saccharomyces bayanus
ttcttgtcgtacttatagatcgctacgttatttcaattttgaaaatctgagtcctgggagtgcgga

SEQ ID NO: 27 - protein, 609 aa, Homo sapiens [sequence omitted]

SEQ ID NO: 28 - protein, 482 aa, Artificial
  Synthetic polypeptide
MVRSGNKAAWLCMDVGFTMSNSIPGIESPFEQAKKVITMFVQRQVFAENKDEIALVLFGTDGTDNPLSGGDQYQNITVHRHLMLPDFDLLEDIESKIQPGSQQADFLDALIVSMDVIQHETIGKKFEKRHIEIFTDLSSRFSKSQLDIIIHSLKKCDISERHSIHWPCRLTIGSNLSIRIAAYKSILQERVKKTTWDAKTLKKEDIQKETVYCLNDDDETEVLKEDIIQGFRYGSDIVPFSKVDEEQMKYKSEGKCFSVLGFCKSSQVQRRFFMGNQVLKVFAARDDEAAAVALSSLIHALDDLDIWAIVRYAYDKRANPQVGVAFPHIKHNYECLVYVQLPFMEDLRQYMFSSLKNSKKYAPTEAQLNAVDALIDSMSLAKKDEKTDTLEDLFPTTKIPNPRFQRLFQCLLHRALHPREPLPPIQQHIWNMLNPPAEVTTKSQIPLSKIKTLFPLIEAKKKDQVTAQEIFQDNHEDGPTAK

SEQ ID NO: 29 - DNA, 10 bp, Methanobacterium thermoautotrophicum
aatttttgga

SEQ ID NO: 30 - protein, 83 aa, Methanobacterium thermoautotrophicum
GSVIDVSSQRVNVQRPLDALGNSLNSPVIIKLKGDREFRGVLKSFDLHMNLVLNDAEELEDGEVTRRLGTVLIRGDNIVYISP

SEQ ID NO: 31 - DNA, 25 bp, Escherichia virus MS2
gcgcacatgaggatcacccatgtgc

SEQ ID NO: 32 - protein, 116 aa, Escherichia virus MS2
MASNFTQFVLVDNGGTGDVTVAPSNFANGIAEISSNSRSQAYKVTCSVRQSSAQNRKYTIKVEVPKGAWRSYLNMELTIPIFATNSDCELIVKAMQGLLKDGNPIPSAIAANSGIY

SEQ ID NO: 33 - DNA, 26 bp, Bacteriophage PP7
ataaggagtttatatggaaaccctta

SEQ ID NO: 34 - protein, 127 aa, Bacteriophage PP7
MSKTIVLSVGEATRTLTEIQSTADRQIFEEKVGPLVGRLRLTASLRQNGAKTAYRVNLKLDQADWDCSTSVCGELPKVRYTQVWSHDVTIVANSTEASRKSLYDLTKSLVATSQVEDLVVNLVPLGR

SEQ ID NO: 35 - DNA, 19 bp, Unknown
  Shigella virus
ctgaatgcctgcgagcatc

SEQ ID NO: 36 - protein, 62 aa, Unknown
  Shigella virus
MKSIRCKNCNKLLFKADSFDHIEIRCPRCKRHIIMLNACEHPTEKHCGKREKITHSDETVRY

SEQ ID NO: 37 - protein, 79 aa, Homo sapiens
RVLYVGGLAEEVDDKVLHAAFIPFGDITDIQIPLDYETEKHRGFAFVEFELAEDAAAAIDNMNESELFGRTIRVNLAKP

SEQ ID NO: 38 - protein, 78 aa, Homo sapiens
RSIYVGNVDYGATAEELEAHFHGCGSVNRVTILCDKFSGHPKGFAYIEFSDKESVRTSLALDESLFRGRQIKVIPKRT

SEQ ID NO: 39 - protein, 73 aa, Homo sapiens
NWLVLKNLTPQIDGSTLRTLCMQHGPLITFHLNLPHGNALVRYSSKEEVVKAQKSLHMCVLGNTTILAEFASE

SEQ ID NO: 40 - protein, 79 aa, Homo sapiens
GKLFVGGLSFDTNEQSLEQVFSKYGQISEVVVVKDRETQRSRGFGFVTFENIDDAKDAMMAMNGKSVDGRQIRVDQAGK

SEQ ID NO: 41 - protein, 74 aa, Homo sapiens
LIPVKQYPKFNFVGKLLGPRGNSLKRLQEETGAKMSILGKGSMRDKAKEEELRKSGEAKYAHLSDELHVLISEQ

SEQ ID NO: 42 - protein, 67 aa, Homo sapiens
LIPVKQFPKFNFVGKLLGPRGNSLKRLQEETLTKMSILGKGSMRDKAKEEELRKSGEAKYFHLNDDL

SEQ ID NO: 43 - protein, 62 aa, Homo sapiens
PEVFQVQTRLLKAIFGPDGSRIPYIEQVSKAMLELKALESSDLTEVVVYGSYLYKLRTKWML

SEQ ID NO: 44 - protein, 71 aa, Mus musculus
QVLGTVKWFNVRNGYGFINRNDTKEDVFVHQTAIKRNNPRKFLRSVGDGETVEFDVVEGEKGARAANVTGP

SEQ ID NO: 45 - protein, 71 aa, Mus musculus
KVLGTVKWFNVRNGYGFINRNDTKEDVFVHQTAIKKNNPRKYLRSVGDGETVEFDVVEGEKGAEAANVTGP

SEQ ID NO: 46 - protein, 138 aa, Homo sapiens
ARFFLIKSNNHENVSLAKAKGVWSTLPVNEKKLNLAFRSARSVILIFSVRESGKFQGFARLSSESHHGGSPIHWVLPAGMSAKMLGGVFKIDWICRRELPFTKSAHLTNPWNEHKPVKIGRDGQEIELECGTQLCLLF

SEQ ID NO: 47 - protein, 343 aa, Homo sapiens
GRSRLLEDFRNNRFPNLQLRDLIGHIVEFSQDQHGSRFIQQKLERATPAERQMVFNEILQAAYQLMTDVFGNYVIQKFFEFGSLDQKLALATRIRGHVLPLALQMYGCRVIQKALESISSDQQVISEMVKELDGHVLKCVKDQNGNHVVQKCIECVQPQSLQFIIDAFKGQVFVLSTHPYGCRVIQRILEHCTAEQTLPILEELHQHTEQLVQDQYGNYVIQHVLEHGRPEDKSKIVSEIRGKVLALSQHKFASNVVEKCVTHASRAERALLIDEVCCQNDGPHSALYTMMKDQYANYVVQKMIDMAEPAQRKIIMHKIRPHITTLRKYTYGKHILAKLEKYY

SEQ ID NO: 48 - protein, 23 aa, Homo sapiens
FFCDTCDRGFKNQEKYDKHMSEH

SEQ ID NO: 49 - protein, 23 aa, Homo sapiens
CQMCQKQCRDENGFKCHCMSESH

SEQ ID NO: 50 - protein, 79 aa, Homo sapiens
TSLKVDNLTYRTSPDTLRRVFEKYGRVGDVYIPRDRYTKESRGFAFVRFHDKRDAEDAMDAMDGAVLDGRELRVQMARY

SEQ ID NO: 51 - protein, 84 aa, Drosophila melanogaster
QLFLGNIPHHASEDDLREIFSRFGNVLELRILSKAGNKVPPGMRSPLNYGFITYDDPEAVQKCLANCPLYFPENSPDGQKLNVE

SEQ ID NO: 52 - protein, 79 aa, Homo sapiens
GKLFVGGLNFNTDEQALEDHFSSFGPISEVVVVKDRETQRSRGFGFITFTNPEHASVAMRAMNGESLDGRQIRVDHAGK

SEQ ID NO: 53 - protein, 683 aa, Moloney murine leukemia virus
TLNIEDEHRLHETSKEPDVSLGSTWLSDFPQAWAETGGMGLAVRQAPLIIPLKATSTPVSIKQYPMSQEARLGIKPHIQRLLDQGILVPCQSPWNTPLLPVKKPGTNDYRPVQDLREVNKRVEDIHPTVPNPYNLLSGLPPSHQWYTVLDLKDAFFCLRLHPTSQPLFAFEWRDPEMGISGQLTWTRLPQGFKNSPTLFDEALHRDLADFRIQHPDLILLQYVDDLLLAATSELDCQQGTRALLQTLGNLGYRASAKKAQICQKQVKYLGYLLKEGQRWLTEARKETVMGQPTPKTPRQLREFLGTAGFCRLWIPGFAEMAAPLYPLTKTGTLFNWGPDQQKAYQEIKQALLTAPALGLPDLTKPFELFVDEKQGYAKGVLTQKLGPWRRPVAYLSKKLDPVAAGWPPCLRMVAAIAVLTKDAGKLTMGQPLVILAPHAVEALVKQPPDRWLSNARMTHYQALLLDTDRVQFGPVVALNPATLLPLPEEGLQHNCLDILAEAHGTRPDLTDQPLPDADHTWYTDGSSLLQEGQRKAGAAVTTETEVIWAKALPAGTSAQRAELIALTQALKMAEGKKLNVYTDSRYAFATAHIHGEIYRRRGLLTSEGKEIKNKDEILALLKALFLPKRLSIIHCPGHQKGHSAEARGNRMADQAARKAAITETPDTSTLLIENSSPNSRLIN

SEQ ID NO: 54 - DNA, 19 bp, Artificial
  Synthetic RNA  spacer
  misc_feature (1)..(19): wherein n is A, C, T or G
nnnnnnnnnnnnnnnnnnn

SEQ ID NO: 55 - DNA, 22 bp, Artificial
  Synthetic target strand
  misc_feature (4)..(22): wherein n is A, C, T or G
aaannnnnnnnnnnnnnnnnnn

SEQ ID NO: 56 - DNA, 22 bp, Artificial
  Synthetic non-target strand
  misc_feature (4)..(22): wherein n is A, C, T or G
tttnnnnnnnnnnnnnnnnnnn

SEQ ID NO: 57 - DNA, 3790 bp, Artificial
  Synthetic polynucleotide
ccatgggcagcaaactggaaaaatttacgaattgttatagcctgtccaagaccctgcgtttcaaagccatccccgttggcaaaacccaggagaatattgataataaacgtctgctggttgaggatgaaaaaagagcagaagactataagggagtcaaaaaactgctggatcggtactacctgagctttataaatgacgtgctgcatagcattaaactgaaaaatctgaataactatattagtctgttccgcaagaaaacccgaacagagaaagaaaataaagagctggaaaacctggagatcaatctgcgtaaagagatcgcaaaagcttttaaaggaaatgaaggttataaaagcctgttcaaaaaagacattattgaaaccatcctgccggaatttctggatgataaagacgagatagcgctcgtgaacagcttcaacgggttcacgaccgccttcacgggctttttcgataacagggaaaatatgttttcagaggaagccaaaagcacctcgatagcgttccgttgcattaatgaaaatttgacaagatatatcagcaacatggatattttcgagaaagttgatgcgatctttgacaaacatgaagtgcaggagattaaggaaaaaattctgaacagcgattatgatgttgaggattttttcgagggggaattttttaactttgtactgacacaggaaggtatagatgtgtataatgctattatcggcgggttcgttaccgaatccggcgagaaaattaagggtctgaatgagtacatcaatctgtataaccaaaagaccaaacagaaactgccaaaattcaaaccgctgtacaagcaagtcctgagcgatcgggaaagcttgagcttttacggtgaaggttataccagcgacgaggaggtactggaggtctttcgcaataccctgaacaagaacagcgaaattttcagctccattaaaaagctggagaaactgtttaagaattttgacgagtacagcagcgcaggtatttttgtgaagaacggacctgccataagcaccattagcaaggatatttttggagagtggaatgttatccgtgataaatggaacgcggaatatgatgacatacacctgaaaaagaaggctgtggtaactgagaaatatgaagacgatcgccgcaaaagctttaaaaaaatcggcagctttagcctggagcagctgcaggaatatgcggacgccgacctgagcgtggtcgagaaactgaaggaaattattatccaaaaagtggatgagatttacaaggtatatggtagcagcgaaaaactgtttgatgcggacttcgttctggaaaaaagcctgaaaaaaaatgatgctgttgttgcgatcatgaaagacctgctcgatagcgttaagagctttgaaaattacattaaagcattctttggcgagggcaaagaaacaaacagagacgaaagcttttatggcgacttcgtcctggcttatgacatcctgttgaaggtagatcatatatatgatgcaattcgtaattacgtaacccaaaagccgtacagcaaagataagttcaaactgtatttccagaacccgcagtttatgggtggctgggacaaagacaaggagacagactatcgcgccactattctgcgttacggcagcaagtactatctcgccatcatggacaaaaaatatgcaaagtgtctgcagaaaatcgataaagacgacgtgaacggaaattacgaaaagattaattataagctgctgccagggcccaacaagatgttaccgaaagtatttttttccaaaaaatggatggcatactataacccgagcgaggatatacagaagatttacaaaaatgggaccttcaaaaagggggatatgttcaatctgaatgactgccacaaactgatcgatttttttaaagatagcatcagccgttatcctaaatggtcaaacgcgtatgattttaatttctccgaaacggagaaatataaagacattgctggtttctatcgcgaagtcgaagaacagggttataaagttagctttgaatcggccagcaagaaagaggttgataaactggtggaggagggtaagctgtatatgtttcagatttataacaaagactttagcgacaaaagccacggtactcctaatctgcatacgatgtactttaaactgctgtttgatgagaataaccacggccaaatccgtctctccggtggagcagaactttttatgcggcgtgcgagcctaaaaaaggaagaactggtggtgcatcccgccaacagcccgattgctaacaaaaatccagataatcctaagaagaccaccacactgtcgtacgatgtctataaggataaacgtttctcggaagaccagtatgaattgcatataccgatagcaattaataaatgcccaaaaaacattttcaaaatcaacactgaagttcgtgtgctgctgaaacatgatgataatccgtatgtgatcggaattgaccgtggggagagaaatctgctgtatattgtagtcgttgatggcaagggcaacatcgttgagcagtatagcctgaatgaaataattaataattttaacggtatacgtattaaaaccgactatcatagcctgctggataaaaaggagaaagagcgttttgaggcacgccaaaattggacgagcatcgaaaacatcaaggaactgaaggcaggatatatcagccaagtagtccataaaatctgtgaactggtggagaagtacgacgctgtcattgccctggaagacctcaatagcggctttaaaaacagccgggtgaaggtggagaaacaggtataccaaaagtttgaaaagatgctcattgataagctgaactatatggttgataaaaagagcaacccgtgcgccactggcggtgcactgaaagggtaccaaattaccaataaatttgaaagctttaaaagcatgagcacgcagaatgggtttattttttatataccagcatggctgacgagcaagattgaccccagcactggttttgtcaatctgctgaaaaccaaatacacaagcattgcggatagcaaaaaatttatttcgagcttcgaccgtattatgtatgttccggaggaagatctgtttgaatttgccctggattataaaaacttcagccgcaccgatgcagattatatcaaaaaatggaagctgtacagttatggtaatcgtatacgtatcttccgtaatccgaagaaaaacaatgtgttcgattgggaagaggtctgtctgaccagcgcgtataaagaactgttcaacaagtacggaataaattatcagcaaggtgacattcgcgcactgctgtgtgaacagtcagataaagcattttatagcagctttatggcgctgatgagcctgatgctccagatgcgcaacagcataaccggtcgcacagatgttgactttctgatcagccctgtgaagaatagcgacggcatcttctacgattccaggaactatgaagcacaggaaaacgctattctgcctaaaaatgccgatgccaacggcgcctataatattgcacggaaggttctgtgggcgattggacagttcaagaaagcggaagatgagaagctggataaggtaaaaattgctattagcaataaggaatggctggagtacgcacagacatcggttaaacacggtagtaaaaggccggcggccacgaaaaaggccggccaggcaaaaaagaaaaagggagcggccgcactcgagcaccaccaccaccaccactgagcggccgc

SEQ ID NO: 58 - DNA, 8986 bp, Artificial
  Synthetic plasmid
tggcgaatgggacgcgccctgtagcggcgcattaagcgcggcgggtgtggtggttacgcgcagcgtgaccgctacacttgccagcgccctagcgcccgctcctttcgctttcttcccttcctttctcgccacgttcgccggctttccccgtcaagctctaaatcgggggctccctttagggttccgatttagtgctttacggcacctcgaccccaaaaaacttgattagggtgatggttcacgtagtgggccatcgccctgatagacggtttttcgccctttgacgttggagtccacgttctttaatagtggactcttgttccaaactggaacaacactcaaccctatctcggtctattcttttgatttataagggattttgccgatttcggcctattggttaaaaaatgagctgatttaacaaaaatttaacgcgaattttaacaaaatattaacgtttacaatttcaggtggcacttttcggggaaatgtgcgcggaacccctatttgtttatttttctaaatacattcaaatatgtatccgctcatgaattaattcttagaaaaactcatcgagcatcaaatgaaactgcaatttattcatatcaggattatcaataccatatttttgaaaaagccgtttctgtaatgaaggagaaaactcaccgaggcagttccataggatggcaagatcctggtatcggtctgcgattccgactcgtccaacatcaatacaacctattaatttcccctcgtcaaaaataaggttatcaagtgagaaatcaccatgagtgacgactgaatccggtgagaatggcaaaagtttatgcatttctttccagacttgttcaacaggccagccattacgctcgtcatcaaaatcactcgcatcaaccaaaccgttattcattcgtgattgcgcctgagcgagacgaaatacgcgatcgctgttaaaaggacaattacaaacaggaatcgaatgcaaccggcgcaggaacactgccagcgcatcaacaatattttcacctgaatcaggatattcttctaatacctggaatgctgttttcccggggatcgcagtggtgagtaaccatgcatcatcaggagtacggataaaatgcttgatggtcggaagaggcataaattccgtcagccagtttagtctgaccatctcatctgtaacatcattggcaacgctacctttgccatgtttcagaaacaactctggcgcatcgggcttcccatacaatcgatagattgtcgcacctgattgcccgacattatcgcgagcccatttatacccatataaatcagcatccatgttggaatttaatcgcggcctagagcaagacgtttcccgttgaatatggctcataacaccccttgtattactgtttatgtaagcagacagttttattgttcatgaccaaaatcccttaacgtgagttttcgttccactgagcgtcagaccccgtagaaaagatcaaaggatcttcttgagatcctttttttctgcgcgtaatctgctgcttgcaaacaaaaaaaccaccgctaccagcggtggtttgtttgccggatcaagagctaccaactctttttccgaaggtaactggcttcagcagagcgcagataccaaatactgtccttctagtgtagccgtagttaggccaccacttcaagaactctgtagcaccgcctacatacctcgctctgctaatcctgttaccagtggctgctgccagtggcgataagtcgtgtcttaccgggttggactcaagacgatagttaccggataaggcgcagcggtcgggctgaacggggggttcgtgcacacagcccagcttggagcgaacgacctacaccgaactgagatacctacagcgtgagctatgagaaagcgccacgcttcccgaagggagaaaggcggacaggtatccggtaagcggcagggtcggaacaggagagcgcacgagggagcttccagggggaaacgcctggtatctttatagtcctgtcgggtttcgccacctctgacttgagcgtcgatttttgtgatgctcgtcaggggggcggagcctatggaaaaacgccagcaacgcggcctttttacggttcctggccttttgctggccttttgctcacatgttctttcctgcgttatcccctgattctgtggataaccgtattaccgcctttgagtgagctgataccgctcgccgcagccgaacgaccgagcgcagcgagtcagtgagcgaggaagcggaagagcgcctgatgcggtattttctccttacgcatctgtgcggtatttcacaccgcatatatggtgcactctcagtacaatctgctctgatgccgcatagttaagccagtatacactccgctatcgctacgtgactgggtcatggctgcgccccgacacccgccaacacccgctgacgcgccctgacgggcttgtctgctcccggcatccgcttacagacaagctgtgaccgtctccgggagctgcatgtgtcagaggttttcaccgtcatcaccgaaacgcgcgaggcagctgcggtaaagctcatcagcgtggtcgtgaagcgattcacagatgtctgcctgttcatccgcgtccagctcgttgagtttctccagaagcgttaatgtctggcttctgataaagcgggccatgttaagggcggttttttcctgtttggtcactgatgcctccgtgtaagggggatttctgttcatgggggtaatgataccgatgaaacgagagaggatgctcacgatacgggttactgatgatgaacatgcccggttactggaacgttgtgagggtaaacaactggcggtatggatgcggcgggaccagagaaaaatcactcagggtcaatgccagcgcttcgttaatacagatgtaggtgttccacagggtagccagcagcatcctgcgatgcagatccggaacataatggtgcagggcgctgacttccgcgtttccagactttacgaaacacggaaaccgaagaccattcatgttgttgctcaggtcgcagacgttttgcagcagcagtcgcttcacgttcgctcgcgtatcggtgattcattctgctaaccagtaaggcaaccccgccagcctagccgggtcctcaacgacaggagcacgatcatgcgcacccgtggggccgccatgccggcgataatggcctgcttctcgccgaaacgtttggtggcgggaccagtgacgaaggcttgagcgagggcgtgcaagattccgaataccgcaagcgacaggccgatcatcgtcgcgctccagcgaaagcggtcctcgccgaaaatgacccagagcgctgccggcacctgtcctacgagttgcatgataaagaagacagtcataagtgcggcgacgatagtcatgccccgcgcccaccggaaggagctgactgggttgaaggctctcaagggcatcggtcgagatcccggtgcctaatgagtgagctaacttacattaattgcgttgcgctcactgcccgctttccagtcgggaaacctgtcgtgccagctgcattaatgaatcggccaacgcgcggggagaggcggtttgcgtattgggcgccagggtggtttttcttttcaccagtgagacgggcaacagctgattgcccttcaccgcctggccctgagagagttgcagcaagcggtccacgctggtttgccccagcaggcgaaaatcctgtttgatggtggttaacggcgggatataacatgagctgtcttcggtatcgtcgtatcccactaccgagatatccgcaccaacgcgcagcccggactcggtaatggcgcgcattgcgcccagcgccatctgatcgttggcaaccagcatcgcagtgggaacgatgccctcattcagcatttgcatggtttgttgaaaaccggacatggcactccagtcgccttcccgttccgctatcggctgaatttgattgcgagtgagatatttatgccagccagccagacgcagacgcgccgagacagaacttaatgggcccgctaacagcgcgatttgctggtgacccaatgcgaccagatgctccacgcccagtcgcgtaccgtcttcatgggagaaaataatactgttgatgggtgtctggtcagagacatcaagaaataacgccggaacattagtgcaggcagcttccacagcaatggcatcctggtcatccagcggatagttaatgatcagcccactgacgcgttgcgcgagaagattgtgcaccgccgctttacaggcttcgacgccgcttcgttctaccatcgacaccaccacgctggcacccagttgatcggcgcgagatttaatcgccgcgacaatttgcgacggcgcgtgcagggccagactggaggtggcaacgccaatcagcaacgactgtttgcccgccagttgttgtgccacgcggttgggaatgtaattcagctccgccatcgccgcttccactttttcccgcgttttcgcagaaacgtggctggcctggttcaccacgcgggaaacggtctgataagagacaccggcatactctgcgacatcgtataacgttactggtttcacattcaccaccctgaattgactctcttccgggcgctatcatgccataccgcgaaaggttttgcgccattcgatggtgtccgggatctcgacgctctcccttatgcgactcctgcattaggaagcagcccagtagtaggttgaggccgttgagcaccgccgccgcaaggaatggtgcatgcaaggagatggcgcccaacagtcccccggccacggggcctgccaccatacccacgccgaaacaagcgctcatgagcccgaagtggcgagcccgatcttccccatcggtgatgtcggcgatataggcgccagcaaccgcacctgtggcgccggtgatgccggccacgatgcgtccggcgtagaggatcgagatctcgatcccgcgaaattaatacgactcactataggggaattgtgagcggataacaattcccctctagaaataattttgtttaactttaagaaggagatataccatgggcagcaaactggaaaaatttacgaattgttatagcctgtccaagaccctgcgtttcaaagccatccccgttggcaaaacccaggagaatattgataataaacgtctgctggttgaggatgaaaaaagagcagaagactataagggagtcaaaaaactgctggatcggtactacctgagctttataaatgacgtgctgcatagcattaaactgaaaaatctgaataactatattagtctgttccgcaagaaaacccgaacagagaaagaaaataaagagctggaaaacctggagatcaatctgcgtaaagagatcgcaaaagcttttaaaggaaatgaaggttataaaagcctgttcaaaaaagacattattgaaaccatcctgccggaatttctggatgataaagacgagatagcgctcgtgaacagcttcaacgggttcacgaccgccttcacgggctttttcgataacagggaaaatatgttttcagaggaagccaaaagcacctcgatagcgttccgttgcattaatgaaaatttgacaagatatatcagcaacatggatattttcgagaaagttgatgcgatctttgacaaacatgaagtgcaggagattaaggaaaaaattctgaacagcgattatgatgttgaggattttttcgagggggaattttttaactttgtactgacacaggaaggtatagatgtgtataatgctattatcggcgggttcgttaccgaatccggcgagaaaattaagggtctgaatgagtacatcaatctgtataaccaaaagaccaaacagaaactgccaaaattcaaaccgctgtacaagcaagtcctgagcgatcgggaaagcttgagcttttacggtgaaggttataccagcgacgaggaggtactggaggtctttcgcaataccctgaacaagaacagcgaaattttcagctccattaaaaagctggagaaactgtttaagaattttgacgagtacagcagcgcaggtatttttgtgaagaacggacctgccataagcaccattagcaaggatatttttggagagtggaatgttatccgtgataaatggaacgcggaatatgatgacatacacctgaaaaagaaggctgtggtaactgagaaatatgaagacgatcgccgcaaaagctttaaaaaaatcggcagctttagcctggagcagctgcaggaatatgcggacgccgacctgagcgtggtcgagaaactgaaggaaattattatccaaaaagtggatgagatttacaaggtatatggtagcagcgaaaaactgtttgatgcggacttcgttctggaaaaaagcctgaaaaaaaatgatgctgttgttgcgatcatgaaagacctgctcgatagcgttaagagctttgaaaattacattaaagcattctttggcgagggcaaagaaacaaacagagacgaaagcttttatggcgacttcgtcctggcttatgacatcctgttgaaggtagatcatatatatgatgcaattcgtaattacgtaacccaaaagccgtacagcaaagataagttcaaactgtatttccagaacccgcagtttatgggtggctgggacaaagacaaggagacagactatcgcgccactattctgcgttacggcagcaagtactatctcgccatcatggacaaaaaatatgcaaagtgtctgcagaaaatcgataaagacgacgtgaacggaaattacgaaaagattaattataagctgctgccagggcccaacaagatgttaccgaaagtatttttttccaaaaaatggatggcatactataacccgagcgaggatatacagaagatttacaaaaatgggaccttcaaaaagggggatatgttcaatctgaatgactgccacaaactgatcgatttttttaaagatagcatcagccgttatcctaaatggtcaaacgcgtatgattttaatttctccgaaacggagaaatataaagacattgctggtttctatcgcgaagtcgaagaacagggttataaagttagctttgaatcggccagcaagaaagaggttgataaactggtggaggagggtaagctgtatatgtttcagatttataacaaagactttagcgacaaaagccacggtactcctaatctgcatacgatgtactttaaactgctgtttgatgagaataaccacggccaaatccgtctctccggtggagcagaactttttatgcggcgtgcgagcctaaaaaaggaagaactggtggtgcatcccgccaacagcccgattgctaacaaaaatccagataatcctaagaagaccaccacactgtcgtacgatgtctataaggataaacgtttctcggaagaccagtatgaattgcatataccgatagcaattaataaatgcccaaaaaacattttcaaaatcaacactgaagttcgtgtgctgctgaaacatgatgataatccgtatgtgatcggaattgaccgtggggagagaaatctgctgtatattgtagtcgttgatggcaagggcaacatcgttgagcagtatagcctgaatgaaataattaataattttaacggtatacgtattaaaaccgactatcatagcctgctggataaaaaggagaaagagcgttttgaggcacgccaaaattggacgagcatcgaaaacatcaaggaactgaaggcaggatatatcagccaagtagtccataaaatctgtgaactggtggagaagtacgacgctgtcattgccctggaagacctcaatagcggctttaaaaacagccgggtgaaggtggagaaacaggtataccaaaagtttgaaaagatgctcattgataagctgaactatatggttgataaaaagagcaacccgtgcgccactggcggtgcactgaaagggtaccaaattaccaataaatttgaaagctttaaaagcatgagcacgcagaatgggtttattttttatataccagcatggctgacgagcaagattgaccccagcactggttttgtcaatctgctgaaaaccaaatacacaagcattgcggatagcaaaaaatttatttcgagcttcgaccgtattatgtatgttccggaggaagatctgtttgaatttgccctggattataaaaacttcagccgcaccgatgcagattatatcaaaaaatggaagctgtacagttatggtaatcgtatacgtatcttccgtaatccgaagaaaaacaatgtgttcgattgggaagaggtctgtctgaccagcgcgtataaagaactgttcaacaagtacggaataaattatcagcaaggtgacattcgcgcactgctgtgtgaacagtcagataaagcattttatagcagctttatggcgctgatgagcctgatgctccagatgcgcaacagcataaccggtcgcacagatgttgactttctgatcagccctgtgaagaatagcgacggcatcttctacgattccaggaactatgaagcacaggaaaacgctattctgcctaaaaatgccgatgccaacggcgcctataatattgcacggaaggttctgtgggcgattggacagttcaagaaagcggaagatgagaagctggataaggtaaaaattgctattagcaataaggaatggctggagtacgcacagacatcggttaaacacggtagtaaaaggccggcggccacgaaaaaggccggccaggcaaaaaagaaaaagggagcggccgcactcgagcaccaccaccaccaccactgagatccggctgctaacaaagcccgaaaggaagctgagttggctgctgccaccgctgagcaataactagcataaccccttggggcctctaaacgggtcttgaggggttttttgctgaaaggaggaactatatccggat

SEQ ID NO: 59 - RNA, 43 nt, Artificial
  Synthetic CRISPR RNA
aauuucuacuaaguguagauggaaucccuucugcagcaccugg

SEQ ID NO: 60 - DNA, 28 bp, Artificial
  Synthetic protospacer
ctttcggaatcccttctgcagcacctgg

SEQ ID NO: 61 - DNA, 133 bp, Homo sapiens
gtaagtatcaaggttacaagacaggtttaaggagaccaatagaaactgggcttgtcgagacagagaagactcttgcgtttctgataggcacctattggtcttactgacatccactttgcctttctctccacag

SEQ ID NO: 62 - DNA, 99 bp, Simian virus 40
gtaagtttagtctttttgtcttttatttcaggtcccggatccggtggtggtgcaaatcaaagaactgctcctcagtggatgttgcctttacttctaggc

SEQ ID NO: 63 - protein, 1963 aa, Artificial
  Synthetic REDRAW editor
MKRTADGSEFESPKKKRKVTLNIEDEYRLHETSKEPDVSLGSTWLSDFPQAWAETGGMGLAVRQAPLIIPLKATSTPVSIKQYPMSQEARLGIKPHIQRLLDQGILVPCQSPWNTPLLPVKKPGTNDYRPVQDLREVNKRVEDIHPTVPNPYNLLSGLPPSHQWYTVLDLKDAFFCLRLHPTSQPLFAFEWRDPEMGISGQLTWTRLPQGFKNSPTLFNEALHRDLADFRIQHPDLILLQYVDDLLLAATSELDCQQGTRALLQTLGNLGYRASAKKAQICQKQVKYLGYLLKEGQRWLTEARKETVMGQPTPKTPRQLREFLGKAGFCRLFIPGFAEMAAPLYPLTKPGTLFNWGPDQQKAYQEIKQALLTAPALGLPDLTKPFELFVDEKQGYAKGVLTQKLGPWRRPVAYLSKKLDPVAAGWPPCLRMVAAIAVLTKDAGKLTMGQPLVILAPHAVEALVKQPPDRWLSNARMTHYQALLLDTDRVQFGPVVALNPATLLPLPEEGLQHNCLDILAEAHGTRPDLTDQPLPDADHTWYTDGSSLLQEGQRKAGAAVTTETEVIWAKALPAGTSAQRAELIALTQALKMAEGKKLNVYTDSRYAFATAHIHGEIYRRRGWLTSEGKEIKNKDEILALLKALFLPKRLSIIHCPGHQKGHSAEARGNRMADQAARKAAITETPDTSTLLIENSSPSGSETPGTSESATPESSKLEKFTNCYSLSKTLRFKAIPVGKTQENIDNKRLLVEDEKRAEDYKGVKKLLDRYYLSFINDVLHSIKLKNLNNYISLFRKKTRTEKENKELENLEINLRKEIAKAFKGNEGYKSLFKKDIIETILPEFLDDKDEIALVNSFNGFTTAFTGFFDNRENMFSEEAKSTSIAFRCINENLTRYISNMDIFEKVDAIFDKHEVQEIKEKILNSDYDVEDFFEGEFFNFVLTQEGIDVYNAIIGGFVTESGEKIKGLNEYINLYNQKTKQKLPKFKPLYKQVLSDRESLSFYGEGYTSDEEVLEVFRNTLNKNSEIFSSIKKLEKLFKNFDEYSSAGIFVKNGPAISTISKDIFGEWNVIRDKWNAEYDDIHLKKKAVVTEKYEDDRRKSFKKIGSFSLEQLQEYADADLSVVEKLKEIIIQKVDEIYKVYGSSEKLFDADFVLEKSLKKNDAVVAIMKDLLDSVKSFENYIKAFFGEGKETNRDESFYGDFVLAYDILLKVDHIYDAIRNYVTQKPYSKDKFKLYFQNPQFMRGWDKDKETDYRATILRYGSKYYLAIMDKKYAKCLQKIDKDDVNGNYEKINYKLLPGPNKMLPRVFFSKKWMAYYNPSEDIQKIYKNGTFKKGDMFNLNDCHKLIDFFKDSISRYPKWSNAYDFNFSETEKYKDIAGFYREVEEQGYKVSFESASKKEVDKLVEEGKLYMFQIYNKDFSDKSHGTPNLHTMYFKLLFDENNHGQIRLSGGAELFMRRASLKKEELVVHPANSPIANKNPDNPKKTTTLSYDVYKDKRFSEDQYELHIPIAINKCPKNIFKINTEVRVLLKHDDNPYVIGIDRGERNLLYIVVVDGKGNIVEQYSLNEIINNFNGIRIKTDYHSLLDKKEKERFEARQNWTSIENIKELKAGYISQVVHKICELVEKYDAVIALEDLNSGFKNSRVKVEKQVYQKFEKMLIDKLNYMVDKKSNPCATGGALKGYQITNKFESFKSMSTQNGFIFYIPAWLTSKIDPSTGFVNLLKTKYTSIADSKKFISSFDRIMYVPEEDLFEFALDYKNFSRTDADYIKKWKLYSYGNRIRIFRNPKKNNVFDWEEVCLTSAYKELFNKYGINYQQGDIRALLCEQSDKAFYSSFMALMSLMLQMANSITGRTDVDFLISPVKNSDGIFYDSRNYEAQENAILPKNADANGAYNIARKVLWAIGQFKKAEDEKLDKVKIAISNKEWLEYAQTSVKHSGGSKRTADGSEFEPKKKRKVGSG

SEQ ID NO: 64 - protein, 1979 aa, Artificial
  Synthetic REDRAW editor
MKRTADGSEFESPKKKRKVTLNIEDEYRLHETSKEPDVSLGSTWLSDFPQAWAETGGMGLAVRQAPLIIPLKATSTPVSIKQYPMSQEARLGIKPHIQRLLDQGILVPCQSPWNTPLLPVKKPGTNDYRPVQDLREVNKRVEDIHPTVPNPYNLLSGLPPSHQWYTVLDLKDAFFCLRLHPTSQPLFAFEWRDPEMGISGQLTWTRLPQGFKNSPTLFNEALHRDLADFRIQHPDLILLQYVDDLLLAATSELDCQQGTRALLQTLGNLGYRASAKKAQICQKQVKYLGYLLKEGQRWLTEARKETVMGQPTPKTPRQLREFLGKAGFCRLFIPGFAEMAAPLYPLTKPGTLFNWGPDQQKAYQEIKQALLTAPALGLPDLTKPFELFVDEKQGYAKGVLTQKLGPWRRPVAYLSKKLDPVAAGWPPCLRMVAAIAVLTKDAGKLTMGQPLVILAPHAVEALVKQPPDRWLSNARMTHYQALLLDTDRVQFGPVVALNPATLLPLPEEGLQHNCLDILAEAHGTRPDLTDQPLPDADHTWYTDGSSLLQEGQRKAGAAVTTETEVIWAKALPAGTSAQRAELIALTQALKMAEGKKLNVYTDSRYAFATAHIHGEIYRRRGWLTSEGKEIKNKDEILALLKALFLPKRLSIIHCPGHQKGHSAEARGNRMADQAARKAAITETPDTSTLLIENSSPSGGSSGGSSGSETPGTSESATPESSGGSSGGSSKLEKFTNCYSLSKTLRFKAIPVGKTQENIDNKRLLVEDEKRAEDYKGVKKLLDRYYLSFINDVLHSIKLKNLNNYISLFRKKTRTEKENKELENLEINLRKEIAKAFKGNEGYKSLFKKDIIETILPEFLDDKDEIALVNSFNGFTTAFTGFFDNRENMFSEEAKSTSIAFRCINENLTRYISNMDIFEKVDAIFDKHEVQEIKEKILNSDYDVEDFFEGEFFNFVLTQEGIDVYNAIIGGFVTESGEKIKGLNEYINLYNQKTKQKLPKFKPLYKQVLSDRESLSFYGEGYTSDEEVLEVFRNTLNKNSEIFSSIKKLEKLFKNFDEYSSAGIFVKNGPAISTISKDIFGEWNVIRDKWNAEYDDIHLKKKAVVTEKYEDDRRKSFKKIGSFSLEQLQEYADADLSVVEKLKEIIIQKVDEIYKVYGSSEKLFDADFVLEKSLKKNDAVVAIMKDLLDSVKSFENYIKAFFGEGKETNRDESFYGDFVLAYDILLKVDHIYDAIRNYVTQKPYSKDKFKLYFQNPQFMRGWDKDKETDYRATILRYGSKYYLAIMDKKYAKCLQKIDKDDVNGNYEKINYKLLPGPNKMLPRVFFSKKWMAYYNPSEDIQKIYKNGTFKKGDMFNLNDCHKLIDFFKDSISRYPKWSNAYDFNFSETEKYKDIAGFYREVEEQGYKVSFESASKKEVDKLVEEGKLYMFQIYNKDFSDKSHGTPNLHTMYFKLLFDENNHGQIRLSGGAELFMRRASLKKEELVVHPANSPIANKNPDNPKKTTTLSYDVYKDKRFSEDQYELHIPIAINKCPKNIFKINTEVRVLLKHDDNPYVIGIDRGERNLLYIVVVDGKGNIVEQYSLNEIINNFNGIRIKTDYHSLLDKKEKERFEARQNWTSIENIKELKAGYISQVVHKICELVEKYDAVIALEDLNSGFKNSRVKVEKQVYQKFEKMLIDKLNYMVDKKSNPCATGGALKGYQITNKFESFKSMSTQNGFIFYIPAWLTSKIDPSTGFVNLLKTKYTSIADSKKFISSFDRIMYVPEEDLFEFALDYKNFSRTDADYIKKWKLYSYGNRIRIFRNPKKNNVFDWEEVCLTSAYKELFNKYGINYQQGDIRALLCEQSDKAFYSSFMALMSLMLQMANSITGRTDVDFLISPVKNSDGIFYDSRNYEAQENAILPKNADANGAYNIARKVLWAIGQFKKAEDEKLDKVKIAISNKEWLEYAQTSVKHSGGSKRTADGSEFEPKKKRKVGSG

SEQ ID NO: 65 - protein, 1963 aa, Artificial
  Synthetic REDRAW editor
MKRTADGSEFESPKKKRKVSKLEKFTNCYSLSKTLRFKAIPVGKTQENIDNKRLLVEDEKRAEDYKGVKKLLDRYYLSFINDVLHSIKLKNLNNYISLFRKKTRTEKENKELENLEINLRKEIAKAFKGNEGYKSLFKKDIIETILPEFLDDKDEIALVNSFNGFTTAFTGFFDNRENMFSEEAKSTSIAFRCINENLTRYISNMDIFEKVDAIFDKHEVQEIKEKILNSDYDVEDFFEGEFFNFVLTQEGIDVYNAIIGGFVTESGEKIKGLNEYINLYNQKTKQKLPKFKPLYKQVLSDRESLSFYGEGYTSDEEVLEVFRNTLNKNSEIFSSIKKLEKLFKNFDEYSSAGIFVKNGPAISTISKDIFGEWNVIRDKWNAEYDDIHLKKKAVVTEKYEDDRRKSFKKIGSFSLEQLQEYADADLSVVEKLKEIIIQKVDEIYKVYGSSEKLFDADFVLEKSLKKNDAVVAIMKDLLDSVKSFENYIKAFFGEGKETNRDESFYGDFVLAYDILLKVDHIYDAIRNYVTQKPYSKDKFKLYFQNPQFMRGWDKDKETDYRATILRYGSKYYLAIMDKKYAKCLQKIDKDDVNGNYEKINYKLLPGPNKMLPRVFFSKKWMAYYNPSEDIQKIYKNGTFKKGDMFNLNDCHKLIDFFKDSISRYPKWSNAYDFNFSETEKYKDIAGFYREVEEQGYKVSFESASKKEVDKLVEEGKLYMFQIYNKDFSDKSHGTPNLHTMYFKLLFDENNHGQIRLSGGAELFMRRASLKKEELVVHPANSPIANKNPDNPKKTTTLSYDVYKDKRFSEDQYELHIPIAINKCPKNIFKINTEVRVLLKHDDNPYVIGIDRGERNLLYIVVVDGKGNIVEQYSLNEIINNFNGIRIKTDYHSLLDKKEKERFEARQNWTSIENIKELKAGYISQVVHKICELVEKYDAVIALEDLNSGFKNSRVKVEKQVYQKFEKMLIDKLNYMVDKKSNPCATGGALKGYQITNKFESFKSMSTQNGFIFYIPAWLTSKIDPSTGFVNLLKTKYTSIADSKKFISSFDRIMYVPEEDLFEFALDYKNFSRTDADYIKKWKLYSYGNRIRIFRNPKKNNVFDWEEVCLTSAYKELFNKYGINYQQGDIRALLCEQSDKAFYSSFMALMSLMLQMANSITGRTDVDFLISPVKNSDGIFYDSRNYEAQENAILPKNADANGAYNIARKVLWAIGQFKKAEDEKLDKVKIAISNKEWLEYAQTSVKHSGSETPGTSESATPESTLNIEDEYRLHETSKEPDVSLGSTWLSDFPQAWAETGGMGLAVRQAPLIIPLKATSTPVSIKQYPMSQEARLGIKPHIQRLLDQGILVPCQSPWNTPLLPVKKPGTNDYRPVQDLREVNKRVEDIHPTVPNPYNLLSGLPPSHQWYTVLDLKDAFFCLRLHPTSQPLFAFEWRDPEMGISGQLTWTRLPQGFKNSPTLFNEALHRDLADFRIQHPDLILLQYVDDLLLAATSELDCQQGTRALLQTLGNLGYRASAKKAQICQKQVKYLGYLLKEGQRWLTEARKETVMGQPTPKTPRQLREFLGKAGFCRLFIPGFAEMAAPLYPLTKPGTLFNWGPDQQKAYQEIKQALLTAPALGLPDLTKPFELFVDEKQGYAKGVLTQKLGPWRRPVAYLSKKLDPVAAGWPPCLRMVAAIAVLTKDAGKLTMGQPLVILAPHAVEALVKQPPDRWLSNARMTHYQALLLDTDRVQFGPVVALNPATLLPLPEEGLQHNCLDILAEAHGTRPDLTDQPLPDADHTWYTDGSSLLQEGQRKAGAAVTTETEVIWAKALPAGTSAQRAELIALTQALKMAEGKKLNVYTDSRYAFATAHIHGEIYRRRGWLTSEGKEIKNKDEILALLKALFLPKRLSIIHCPGHQKGHSAEARGNRMADQAARKAAITETPDTSTLLIENSSPSGGSKRTADGSEFEPKKKRKVGSG

SEQ ID NO: 66 - protein, 1979 aa, Artificial
  Synthetic REDRAW editor
MKRTADGSEFESPKKKRKVSKLEKFTNCYSLSKTLRFKAIPVGKTQENIDNKRLLVEDEKRAEDYKGVKKLLDRYYLSFINDVLHSIKLKNLNNYISLFRKKTRTEKENKELENLEINLRKEIAKAFKGNEGYKSLFKKDIIETILPEFLDDKDEIALVNSFNGFTTAFTGFFDNRENMFSEEAKSTSIAFRCINENLTRYISNMDIFEKVDAIFDKHEVQEIKEKILNSDYDVEDFFEGEFFNFVLTQEGIDVYNAIIGGFVTESGEKIKGLNEYINLYNQKTKQKLPKFKPLYKQVLSDRESLSFYGEGYTSDEEVLEVFRNTLNKNSEIFSSIKKLEKLFKNFDEYSSAGIFVKNGPAISTISKDIFGEWNVIRDKWNAEYDDIHLKKKAVVTEKYEDDRRKSFKKIGSFSLEQLQEYADADLSVVEKLKEIIIQKVDEIYKVYGSSEKLFDADFVLEKSLKKNDAVVAIMKDLLDSVKSFENYIKAFFGEGKETNRDESFYGDFVLAYDILLKVDHIYDAIRNYVTQKPYSKDKFKLYFQNPQFMRGWDKDKETDYRATILRYGSKYYLAIMDKKYAKCLQKIDKDDVNGNYEKINYKLLPGPNKMLPRVFFSKKWMAYYNPSEDIQKIYKNGTFKKGDMFNLNDCHKLIDFFKDSISRYPKWSNAYDFNFSETEKYKDIAGFYREVEEQGYKVSFESASKKEVDKLVEEGKLYMFQIYNKDFSDKSHGTPNLHTMYFKLLFDENNHGQIRLSGGAELFMRRASLKKEELVVHPANSPIANKNPDNPKKTTTLSYDVYKDKRFSEDQYELHIPIAINKCPKNIFKINTEVRVLLKHDDNPYVIGIDRGERNLLYIVVVDGKGNIVEQYSLNEIINNFNGIRIKTDYHSLLDKKEKERFEARQNWTSIENIKELKAGYISQVVHKICELVEKYDAVIALEDLNSGFKNSRVKVEKQVYQKFEKMLIDKLNYMVDKKSNPCATGGALKGYQITNKFESFKSMSTQNGFIFYIPAWLTSKIDPSTGFVNLLKTKYTSIADSKKFISSFDRIMYVPEEDLFEFALDYKNFSRTDADYIKKWKLYSYGNRIRIFRNPKKNNVFDWEEVCLTSAYKELFNKYGINYQQGDIRALLCEQSDKAFYSSFMALMSLMLQMANSITGRTDVDFLISPVKNSDGIFYDSRNYEAQENAILPKNADANGAYNIARKVLWAIGQFKKAEDEKLDKVKIAISNKEWLEYAQTSVKHSGGSSGGSSGSETPGTSESATPESSGGSSGGSTLNIEDEYRLHETSKEPDVSLGSTWLSDFPQAWAETGGMGLAVRQAPLIIPLKATSTPVSIKQYPMSQEARLGIKPHIQRLLDQGILVPCQSPWNTPLLPVKKPGTNDYRPVQDLREVNKRVEDIHPTVPNPYNLLSGLPPSHQWYTVLDLKDAFFCLRLHPTSQPLFAFEWRDPEMGISGQLTWTRLPQGFKNSPTLFNEALHRDLADFRIQHPDLILLQYVDDLLLAATSELDCQQGTRALLQTLGNLGYRASAKKAQICQKQVKYLGYLLKEGQRWLTEARKETVMGQPTPKTPRQLREFLGKAGFCRLFIPGFAEMAAPLYPLTKPGTLFNWGPDQQKAYQEIKQALLTAPALGLPDLTKPFELFVDEKQGYAKGVLTQKLGPWRRPVAYLSKKLDPVAAGWPPCLRMVAAIAVLTKDAGKLTMGQPLVILAPHAVEALVKQPPDRWLSNARMTHYQALLLDTDRVQFGPVVALNPATLLPLPEEGLQHNCLDILAEAHGTRPDLTDQPLPDADHTWYTDGSSLLQEGQRKAGAAVTTETEVIWAKALPAGTSAQRAELIALTQALKMAEGKKLNVYTDSRYAFATAHIHGEIYRRRGWLTSEGKEIKNKDEILALLKALFLPKRLSIIHCPGHQKGHSAEARGNRMADQAARKAAITETPDTSTLLIENSSPSGGSKRTADGSEFEPKKKRKVGSG

SEQ ID NO: 67 - protein, 1963 aa, Artificial
  Synthetic REDRAW editor
MKRTADGSEFESPKKKRKVTLNIEDEYRLHETSKEPDVSLGSTWLSDFPQAWAETGGMGLAVRQAPLIIPLKATSTPVSIKQYPMSQEARLGIKPHIQRLLDQGILVPCQSPWNTPLLPVKKPGTNDYRPVQDLREVNKRVEDIHPTVPNPYNLLSGLPPSHQWYTVLDLKDAFFCLRLHPTSQPLFAFEWRDPEMGISGQLTWTRLPQGFKNSPTLFNEALHRDLADFRIQHPDLILLQYVDDLLLAATSELDCQQGTRALLQTLGNLGYRASAKKAQICQKQVKYLGYLLKEGQRWLTEARKETVMGQPTPKTPRQLREFLGKAGFCRLFIPGFAEMAAPLYPLTKPGTLFNWGPDQQKAYQEIKQALLTAPALGLPDLTKPFELFVDEKQGYAKGVLTQKLGPWRRPVAYLSKKLDPVAAGWPPCLRMVAAIAVLTKDAGKLTMGQPLVILAPHAVEALVKQPPDRWLSNARMTHYQALLLDTDRVQFGPVVALNPATLLPLPEEGLQHNCLDILAEAHGTRPDLTDQPLPDADHTWYTDGSSLLQEGQRKAGAAVTTETEVIWAKALPAGTSAQRAELIALTQALKMAEGKKLNVYTDSRYAFATAHIHGEIYRRRGWLTSEGKEIKNKDEILALLKALFLPKRLSIIHCPGHQKGHSAEARGNRMADQAARKAAITETPDTSTLLIENSSPSGSETPGTSESATPESSKLEKFTNCYSLSKTLRFKAIPVGKTQENIDNKRLLVEDEKRAEDYKGVKKLLDRYYLSFINDVLHSIKLKNLNNYISLFRKKTRTEKENKELENLEINLRKEIAKAFKGNEGYKSLFKKDIIETILPEFLDDKDEIALVNSFNGFTTAFTGFFDNRENMFSEEAKSTSIAFRCINENLTRYISNMDIFEKVDAIFDKHEVQEIKEKILNSDYDVEDFFEGEFFNFVLTQEGIDVYNAIIGGFVTESGEKIKGLNEYINLYNQKTKQKLPKFKPLYKQVLSDRESLSFYGEGYTSDEEVLEVFRNTLNKNSEIFSSIKKLEKLFKNFDEYSSAGIFVKNGPAISTISKDIFGEWNVIRDKWNAEYDDIHLKKKAVVTEKYEDDRRKSFKKIGSFSLEQLQEYADADLSVVEKLKEIIIQKVDEIYKVYGSSEKLFDADFVLEKSLKKNDAVVAIMKDLLDSVKSFENYIKAFFGEGKETNRDESFYGDFVLAYDILLKVDHIYDAIRNYVTQKPYSKDKFKLYFQNPQFMRGWDKDVETDYRATILRYGSKYYLAIMDKKYAKCLQKIDKDDVNGNYEKINYKLLPGPNKMLPRVFFSKKWMAYYNPSEDIQKIYKNGTFKKGDMFNLNDCHKLIDFFKDSISRYPKWSNAYDFNFSETEKYKDIAGFYREVEEQGYKVSFESASKKEVDKLVEEGKLYMFQIYNKDFSDKSHGTPNLHTMYFKLLFDENNHGQIRLSGGAELFMRRASLKKEELVVHPANSPIANKNPDNPKKTTTLSYDVYKDKRFSEDQYELHIPIAINKCPKNIFKINTEVRVLLKHDDNPYVIGIDRGERNLLYIVVVDGKGNIVEQYSLNEIINNFNGIRIKTDYHSLLDKKEKERFEARQNWTSIENIKELKAGYISQVVHKICELVEKYDAVIALEDLNSGFKNSRVKVEKQVYQKFEKMLIDKLNYMVDKKSNPCATGGALKGYQITNKFESFKSMSTQNGFIFYIPAWLTSKIDPSTGFVNLLKTKYTSIADSKKFISSFDRIMYVPEEDLFEFALDYKNFSRTDADYIKKWKLYSYGNRIRIFRNPKKNNVFDWEEVCLTSAYKELFNKYGINYQQGDIRALLCEQSDKAFYSSFMALMSLMLQMANSITGRTDVDFLISPVKNSDGIFYDSRNYEAQENAILPKNADANGAYNIARKVLWAIGQFKKAEDEKLDKVKIAISNKEWLEYAQTSVKHSGGSKRTADGSEFEPKKKRKVGSG

SEQ ID NO: 68 - protein, 1979 aa, Artificial
  Synthetic REDRAW editor
MKRTADGSEFESPKKKRKVTLNIEDEYRLHETSKEPDVSLGSTWLSDFPQAWAETGGMGLAVRQAPLIIPLKATSTPVSIKQYPMSQEARLGIKPHIQRLLDQGILVPCQSPWNTPLLPVKKPGTNDYRPVQDLREVNKRVEDIHPTVPNPYNLLSGLPPSHQWYTVLDLKDAFFCLRLHPTSQPLFAFEWRDPEMGISGQLTWTRLPQGFKNSPTLFNEALHRDLADFRIQHPDLILLQYVDDLLLAATSELDCQQGTRALLQTLGNLGYRASAKKAQICQKQVKYLGYLLKEGQRWLTEARKETVMGQPTPKTPRQLREFLGKAGFCRLFIPGFAEMAAPLYPLTKPGTLFNWGPDQQKAYQEIKQALLTAPALGLPDLTKPFELFVDEKQGYAKGVLTQKLGPWRRPVAYLSKKLDPVAAGWPPCLRMVAAIAVLTKDAGKLTMGQPLVILAPHAVEALVKQPPDRWLSNARMTHYQALLLDTDRVQFGPVVALNPATLLPLPEEGLQHNCLDILAEAHGTRPDLTDQPLPDADHTWYTDGSSLLQEGQRKAGAAVTTETEVIWAKALPAGTSAQRAELIALTQALKMAEGKKLNVYTDSRYAFATAHIHGEIYRRRGWLTSEGKEIKNKDEILALLKALFLPKRLSIIHCPGHQKGHSAEARGNRMADQAARKAAITETPDTSTLLIENSSPSGGSSGGSSGSETPGTSESATPESSGGSSGGSSKLEKFTNCYSLSKTLRFKAIPVGKTQENIDNKRLLVEDEKRAEDYKGVKKLLDRYYLSFINDVLHSIKLKNLNNYISLFRKKTRTEKENKELENLEINLRKEIAKAFKGNEGYKSLFKKDIIETILPEFLDDKDEIALVNSFNGFTTAFTGFFDNRENMFSEEAKSTSIAFRCINENLTRYISNMDIFEKVDAIFDKHEVQEIKEKILNSDYDVEDFFEGEFFNFVLTQEGIDVYNAIIGGFVTESGEKIKGLNEYINLYNQKTKQKLPKFKPLYKQVLSDRESLSFYGEGYTSDEEVLEVFRNTLNKNSEIFSSIKKLEKLFKNFDEYSSAGIFVKNGPAISTISKDIFGEWNVIRDKWNAEYDDIHLKKKAVVTEKYEDDRRKSFKKIGSFSLEQLQEYADADLSVVEKLKEIIIQKVDEIYKVYGSSEKLFDADFVLEKSLKKNDAVVAIMKDLLDSVKSFENYIKAFFGEGKETNRDESFYGDFVLAYDILLKVDHIYDAIRNYVTQKPYSKDKFKLYFQNPQFMRGWDKDVETDYRATILRYGSKYYLAIMDKKYAKCLQKIDKDDVNGNYEKINYKLLPGPNKMLPRVFFSKKWMAYYNPSEDIQKIYKNGTFKKGDMFNLNDCHKLIDFFKDSISRYPKWSNAYDFNFSETEKYKDIAGFYREVEEQGYKVSFESASKKEVDKLVEEGKLYMFQIYNKDFSDKSHGTPNLHTMYFKLLFDENNHGQIRLSGGAELFMRRASLKKEELVVHPANSPIANKNPDNPKKTTTLSYDVYKDKRFSEDQYELHIPIAINKCPKNIFKINTEVRVLLKHDDNPYVIGIDRGERNLLYIVVVDGKGNIVEQYSLNEIINNFNGIRIKTDYHSLLDKKEKERFEARQNWTSIENIKELKAGYISQVVHKICELVEKYDAVIALEDLNSGFKNSRVKVEKQVYQKFEKMLIDKLNYMVDKKSNPCATGGALKGYQITNKFESFKSMSTQNGFIFYIPAWLTSKIDPSTGFVNLLKTKYTSIADSKKFISSFDRIMYVPEEDLFEFALDYKNFSRTDADYIKKWKLYSYGNRIRIFRNPKKNNVFDWEEVCLTSAYKELFNKYGINYQQGDIRALLCEQSDKAFYSSFMALMSLMLQMANSITGRTDVDFLISPVKNSDGIFYDSRNYEAQENAILPKNADANGAYNIARKVLWAIGQFKKAEDEKLDKVKIAISNKEWLEYAQTSVKHSGGSKRTADGSEFEPKKKRKVGSG

SEQ ID NO: 69 - protein, 1963 aa, Artificial
  Synthetic REDRAW editor
MKRTADGSEFESPKKKRKVSKLEKFTNCYSLSKTLRFKAIPVGKTQENIDNKRLLVEDEKRAEDYKGVKKLLDRYYLSFINDVLHSIKLKNLNNYISLFRKKTRTEKENKELENLEINLRKEIAKAFKGNEGYKSLFKKDIIETILPEFLDDKDEIALVNSFNGFTTAFTGFFDNRENMFSEEAKSTSIAFRCINENLTRYISNMDIFEKVDAIFDKHEVQEIKEKILNSDYDVEDFFEGEFFNFVLTQEGIDVYNAIIGGFVTESGEKIKGLNEYINLYNQKTKQKLPKFKPLYKQVLSDRESLSFYGEGYTSDEEVLEVFRNTLNKNSEIFSSIKKLEKLFKNFDEYSSAGIFVKNGPAISTISKDIFGEWNVIRDKWNAEYDDIHLKKKAVVTEKYEDDRRKSFKKIGSFSLEQLQEYADADLSVVEKLKEIIIQKVDEIYKVYGSSEKLFDADFVLEKSLKKNDAVVAIMKDLLDSVKSFENYIKAFFGEGKETNRDESFYGDFVLAYDILLKVDHIYDAIRNYVTQKPYSKDKFKLYFQNPQFMRGWDKDVETDYRATILRYGSKYYLAIMDKKYAKCLQKIDKDDVNGNYEKINYKLLPGPNKMLPRVFFSKKWMAYYNPSEDIQKIYKNGTFKKGDMFNLNDCHKLIDFFKDSISRYPKWSNAYDFNFSETEKYKDIAGFYREVEEQGYKVSFESASKKEVDKLVEEGKLYMFQIYNKDFSDKSHGTPNLHTMYFKLLFDENNHGQIRLSGGAELFMRRASLKKEELVVHPANSPIANKNPDNPKKTTTLSYDVYKDKRFSEDQYELHIPIAINKCPKNIFKINTEVRVLLKHDDNPYVIGIDRGERNLLYIVVVDGKGNIVEQYSLNEIINNFNGIRIKTDYHSLLDKKEKERFEARQNWTSIENIKELKAGYISQVVHKICELVEKYDAVIALEDLNSGFKNSRVKVEKQVYQKFEKMLIDKLNYMVDKKSNPCATGGALKGYQITNKFESFKSMSTQNGFIFYIPAWLTSKIDPSTGFVNLLKTKYTSIADSKKFISSFDRIMYVPEEDLFEFALDYKNFSRTDADYIKKWKLYSYGNRIRIFRNPKKNNVFDWEEVCLTSAYKELFNKYGINYQQGDIRALLCEQSDKAFYSSFMALMSLMLQMANSITGRTDVDFLISPVKNSDGIFYDSRNYEAQENAILPKNADANGAYNIARKVLWAIGQFKKAEDEKLDKVKIAISNKEWLEYAQTSVKHSGSETPGTSESATPESTLNIEDEYRLHETSKEPDVSLGSTWLSDFPQAWAETGGMGLAVRQAPLIIPLKATSTPVSIKQYPMSQEARLGIKPHIQRLLDQGILVPCQSPWNTPLLPVKKPGTNDYRPVQDLREVNKRVEDIHPTVPNPYNLLSGLPPSHQWYTVLDLKDAFFCLRLHPTSQPLFAFEWRDPEMGISGQLTWTRLPQGFKNSPTLFNEALHRDLADFRIQHPDLILLQYVDDLLLAATSELDCQQGTRALLQTLGNLGYRASAKKAQICQKQVKYLGYLLKEGQRWLTEARKETVMGQPTPKTPRQLREFLGKAGFCRLFIPGFAEMAAPLYPLTKPGTLFNWGPDQQKAYQEIKQALLTAPALGLPDLTKPFELFVDEKQGYAKGVLTQKLGPWRRPVAYLSKKLDPVAAGWPPCLRMVAAIAVLTKDAGKLTMGQPLVILAPHAVEALVKQPPDRWLSNARMTHYQALLLDTDRVQFGPVVALNPATLLPLPEEGLQHNCLDILAEAHGTRPDLTDQPLPDADHTWYTDGSSLLQEGQRKAGAAVTTETEVIWAKALPAGTSAQRAELIALTQALKMAEGKKLNVYTDSRYAFATAHIHGEIYRRRGWLTSEGKEIKNKDEILALLKALFLPKRLSIIHCPGHQKGHSAEARGNRMADQAARKAAITETPDTSTLLIENSSPSGGSKRTADGSEFEPKKKRKVGSG

SEQ ID NO: 70 - protein, 1979 aa, Artificial
  Synthetic REDRAW editor
MKRTADGSEFESPKKKRKVSKLEKFTNCYSLSKTLRFKAIPVGKTQENIDNKRLLVEDEKRAEDYKGVKKLLDRYYLSFINDVLHSIKLKNLNNYISLFRKKTRTEKENKELENLEINLRKEIAKAFKGNEGYKSLFKKDIIETILPEFLDDKDEIALVNSFNGFTTAFTGFFDNRENMFSEEAKSTSIAFRCINENLTRYISNMDIFEKVDAIFDKHEVQEIKEKILNSDYDVEDFFEGEFFNFVLTQEGIDVYNAIIGGFVTESGEKIKGLNEYINLYNQKTKQKLPKFKPLYKQVLSDRESLSFYGEGYTSDEEVLEVFRNTLNKNSEIFSSIKKLEKLFKNFDEYSSAGIFVKNGPAISTISKDIFGEWNVIRDKWNAEYDDIHLKKKAVVTEKYEDDRRKSFKKIGSFSLEQLQEYADADLSVVEKLKEIIIQKVDEIYKVYGSSEKLFDADFVLEKSLKKNDAVVAIMKDLLDSVKSFENYIKAFFGEGKETNRDESFYGDFVLAYDILLKVDHIYDAIRNYVTQKPYSKDKFKLYFQNPQFMRGWDKDVETDYRATILRYGSKYYLAIMDKKYAKCLQKIDKDDVNGNYEKINYKLLPGPNKMLPRVFFSKKWMAYYNPSEDIQKIYKNGTFKKGDMFNLNDCHKLIDFFKDSISRYPKWSNAYDFNFSETEKYKDIAGFYREVEEQGYKVSFESASKKEVDKLVEEGKLYMFQIYNKDFSDKSHGTPNLHTMYFKLLFDENNHGQIRLSGGAELFMRRASLKKEELVVHPANSPIANKNPDNPKKTTTLSYDVYKDKRFSEDQYELHIPIAINKCPKNIFKINTEVRVLLKHDDNPYVIGIDRGERNLLYIVVVDGKGNIVEQYSLNEIINNFNGIRIKTDYHSLLDKKEKERFEARQNWTSIENIKELKAGYISQVVHKICELVEKYDAVIALEDLNSGFKNSRVKVEKQVYQKFEKMLIDKLNYMVDKKSNPCATGGALKGYQITNKFESFKSMSTQNGFIFYIPAWLTSKIDPSTGFVNLLKTKYTSIADSKKFISSFDRIMYVPEEDLFEFALDYKNFSRTDADYIKKWKLYSYGNRIRIFRNPKKNNVFDWEEVCLTSAYKELFNKYGINYQQGDIRALLCEQSDKAFYSSFMALMSLMLQMANSITGRTDVDFLISPVKNSDGIFYDSRNYEAQENAILPKNADANGAYNIARKVLWAIGQFKKAEDEKLDKVKIAISNKEWLEYAQTSVKHSGGSSGGSSGSETPGTSESATPESSGGSSGGSTLNIEDEYRLHETSKEPDVSLGSTWLSDFPQAWAETGGMGLAVRQAPLIIPLKATSTPVSIKQYPMSQEARLGIKPHIQRLLDQGILVPCQSPWNTPLLPVKKPGTNDYRPVQDLREVNKRVEDIHPTVPNPYNLLSGLPPSHQWYTVLDLKDAFFCLRLHPTSQPLFAFEWRDPEMGISGQLTWTRLPQGFKNSPTLFNEALHRDLADFRIQHPDLILLQYVDDLLLAATSELDCQQGTRALLQTLGNLGYRASAKKAQICQKQVKYLGYLLKEGQRWLTEARKETVMGQPTPKTPRQLREFLGKAGFCRLFIPGFAEMAAPLYPLTKPGTLFNWGPDQQKAYQEIKQALLTAPALGLPDLTKPFELFVDEKQGYAKGVLTQKLGPWRRPVAYLSKKLDPVAAGWPPCLRMVAAIAVLTKDAGKLTMGQPLVILAPHAVEALVKQPPDRWLSNARMTHYQALLLDTDRVQFGPVVALNPATLLPLPEEGLQHNCLDILAEAHGTRPDLTDQPLPDADHTWYTDGSSLLQEGQRKAGAAVTTETEVIWAKALPAGTSAQRAELIALTQALKMAEGKKLNVYTDSRYAFATAHIHGEIYRRRGWLTSEGKEIKNKDEILALLKALFLPKRLSIIHCPGHQKGHSAEARGNRMADQAARKAAITETPDTSTLLIENSSPSGGSKRTADGSEFEPKKKRKVGSG

SEQ ID NO: 71 - protein, 1963 aa, Artificial
  Synthetic REDRAW editor
MKRTADGSEFESPKKKRKVTLNIEDEYRLHETSKEPDVSLGSTWLSDFPQAWAETGGMGLAVRQAPLIIPLKATSTPVSIKQYPMSQEARLGIKPHIQRLLDQGILVPCQSPWNTPLLPVKKPGTNDYRPVQDLREVNKRVEDIHPTVPNPYNLLSGLPPSHQWYTVLDLKDAFFCLRLHPTSQPLFAFEWRDPEMGISGQLTWTRLPQGFKNSPTLFNEALHRDLADFRIQHPDLILLQYVDDLLLAATSELDCQQGTRALLQTLGNLGYRASAKKAQICQKQVKYLGYLLKEGQRWLTEARKETVMGQPTPKTPRQLREFLGKAGFCRLFIPGFAEMAAPLYPLTKPGTLFNWGPDQQKAYQEIKQALLTAPALGLPDLTKPFELFVDEKQGYAKGVLTQKLGPWRRPVAYLSKKLDPVAAGWPPCLRMVAAIAVLTKDAGKLTMGQPLVILAPHAVEALVKQPPDRWLSNARMTHYQALLLDTDRVQFGPVVALNPATLLPLPEEGLQHNCLDILAEAHGTRPDLTDQPLPDADHTWYTDGSSLLQEGQRKAGAAVTTETEVIWAKALPAGTSAQRAELIALTQALKMAEGKKLNVYTDSRYAFATAHIHGEIYRRRGWLTSEGKEIKNKDEILALLKALFLPKRLSIIHCPGHQKGHSAEARGNRMADQAARKAAITETPDTSTLLIENSSPSGSETPGTSESATPESSKLEKFTNCYSLSKTLRFKAIPVGKTQENIDNKRLLVEDEKRAEDYKGVKKLLDRYYLSFINDVLHSIKLKNLNNYISLFRKKTRTEKENKELENLEINLRKEIAKAFKGNEGYKSLFKKDIIETILPEFLDDKDEIALVNSFNGFTTAFTGFFDNRENMFSEEAKSTSIAFRCINENLTRYISNMDIFEKVDAIFDKHEVQEIKEKILNSDYDVEDFFEGEFFNFVLTQEGIDVYNAIIGGFVTESGEKIKGLNEYINLYNQKTKQKLPKFKPLYKQVLSDRESLSFYGEGYTSDEEVLEVFRNTLNKNSEIFSSIKKLEKLFKNFDEYSSAGIFVKNGPAISTISKDIFGEWNVIRDKWNAEYDDIHLKKKAVVTEKYEDDRRKSFKKIGSFSLEQLQEYADADLSVVEKLKEIIIQKVDEIYKVYGSSEKLFDADFVLEKSLKKNDAVVAIMKDLLDSVKSFENYIKAFFGEGKETNRDESFYGDFVLAYDILLKVDHIYDAIRNYVTQKPYSKDKFKLYFQNPQFMGGWDKDKETDYRATILRYGSKYYLAIMDKKYAKCLQKIDKDDVNGNYEKINYKLLPGPNKMLPKVFFSKKWMAYYNPSEDIQKIYKNGTFKKGDMFNLNDCHKLIDFFKDSISRYPKWSNAYDFNFSETEKYKDIAGFYREVEEQGYKVSFESASKKEVDKLVEEGKLYMFQIYNKDFSDKSHGTPNLHTMYFKLLFDENNHGQIRLSGGAELFMRRASLKKEELVVHPANSPIANKNPDNPKKTTTLSYDVYKDKRFSEDQYELHIPIAINKCPKNIFKINTEVRVLLKHDDNPYVIGIDRGERNLLYIVVVDGKGNIVEQYSLNEIINNFNGIRIKTDYHSLLDKKEKERFEARQNWTSIENIKELKAGYISQVVHKICELVEKYDAVIALEDLNSGFKNSRVKVEKQVYQKFEKMLIDKLNYMVDKKSNPCATGGALKGYQITNKFESFKSMSTQNGFIFYIPAWLTSKIDPSTGFVNLLKTKYTSIADSKKFISSFDRIMYVPEEDLFEFALDYKNFSRTDADYIKKWKLYSYGNRIRIFRNPKKNNVFDWEEVCLTSAYKELFNKYGINYQQGDIRALLCEQSDKAFYSSFMALMSLMLQMANSITGRTDVDFLISPVKNSDGIFYDSRNYEAQENAILPKNADANGAYNIARKVLWAIGQFKKAEDEKLDKVKIAISNKEWLEYAQTSVKHSGGSKRTADGSEFEPKKKRKVGSG

SEQ ID NO: 72 - protein, 1979 aa, Artificial
  Synthetic REDRAW editor
MKRTADGSEFESPKKKRKVTLNIEDEYRLHETSKEPDVSLGSTWLSDFPQAWAETGGMGLAVRQAPLIIPLKATSTPVSIKQYPMSQEARLGIKPHIQRLLDQGILVPCQSPWNTPLLPVKKPGTNDYRPVQDLREVNKRVEDIHPTVPNPYNLLSGLPPSHQWYTVLDLKDAFFCLRLHPTSQPLFAFEWRDPEMGISGQLTWTRLPQGFKNSPTLFNEALHRDLADFRIQHPDLILLQYVDDLLLAATSELDCQQGTRALLQTLGNLGYRASAKKAQICQKQVKYLGYLLKEGQRWLTEARKETVMGQPTPKTPRQLREFLGKAGFCRLFIPGFAEMAAPLYPLTKPGTLFNWGPDQQKAYQEIKQALLTAPALGLPDLTKPFELFVDEKQGYAKGVLTQKLGPWRRPVAYLSKKLDPVAAGWPPCLRMVAAIAVLTKDAGKLTMGQPLVILAPHAVEALVKQPPDRWLSNARMTHYQALLLDTDRVQFGPVVALNPATLLPLPEEGLQHNCLDILAEAHGTRPDLTDQPLPDADHTWYTDGSSLLQEGQRKAGAAVTTETEVIWAKALPAGTSAQRAELIALTQALKMAEGKKLNVYTDSRYAFATAHIHGEIYRRRGWLTSEGKEIKNKDEILALLKALFLPKRLSIIHCPGHQKGHSAEARGNRMADQAARKAAITETPDTSTLLIENSSPSGGSSGGSSGSETPGTSESATPESSGGSSGGSSKLEKFTNCYSLSKTLRFKAIPVGKTQENIDNKRLLVEDEKRAEDYKGVKKLLDRYYLSFINDVLHSIKLKNLNNYISLFRKKTRTEKENKELENLEINLRKEIAKAFKGNEGYKSLFKKDIIETILPEFLDDKDEIALVNSFNGFTTAFTGFFDNRENMFSEEAKSTSIAFRCINENLTRYISNMDIFEKVDAIFDKHEVQEIKEKILNSDYDVEDFFEGEFFNFVLTQEGIDVYNAIIGGFVTESGEKIKGLNEYINLYNQKTKQKLPKFKPLYKQVLSDRESLSFYGEGYTSDEEVLEVFRNTLNKNSEIFSSIKKLEKLFKNFDEYSSAGIFVKNGPAISTISKDIFGEWNVIRDKWNAEYDDIHLKKKAVVTEKYEDDRRKSFKKIGSFSLEQLQEYADADLSVVEKLKEIIIQKVDEIYKVYGSSEKLFDADFVLEKSLKKNDAVVAIMKDLLDSVKSFENYIKAFFGEGKETNRDESFYGDFVLAYDILLKVDHIYDAIRNYVTQKPYSKDKFKLYFQNPQFMGGWDKDKETDYRATILRYGSKYYLAIMDKKYAKCLQKIDKDDVNGNYEKINYKLLPGPNKMLPKVFFSKKWMAYYNPSEDIQKIYKNGTFKKGDMFNLNDCHKLIDFFKDSISRYPKWSNAYDFNFSETEKYKDIAGFYREVEEQGYKVSFESASKKEVDKLVEEGKLYMFQIYNKDFSDKSHGTPNLHTMYFKLLFDENNHGQIRLSGGAELFMRRASLKKEELVVHPANSPIANKNPDNPKKTTTLSYDVYKDKRFSEDQYELHIPIAINKCPKNIFKINTEVRVLLKHDDNPYVIGIDRGERNLLYIVVVDGKGNIVEQYSLNEIINNFNGIRIKTDYHSLLDKKEKERFEARQNWTSIENIKELKAGYISQVVHKICELVEKYDAVIALEDLNSGFKNSRVKVEKQVYQKFEKMLIDKLNYMVDKKSNPCATGGALKGYQITNKFESFKSMSTQNGFIFYIPAWLTSKIDPSTGFVNLLKTKYTSIADSKKFISSFDRIMYVPEEDLFEFALDYKNFSRTDADYIKKWKLYSYGNRIRIFRNPKKNNVFDWEEVCLTSAYKELFNKYGINYQQGDIRALLCEQSDKAFYSSFMALMSLMLQMANSITGRTDVDFLISPVKNSDGIFYDSRNYEAQENAILPKNADANGAYNIARKVLWAIGQFKKAEDEKLDKVKIAISNKEWLEYAQTSVKHSGGSKRTADGSEFEPKKKRKVGSG

SEQ ID NO: 73 - protein, 1963 aa, Artificial
  Synthetic REDRAW editor
MKRTADGSEFESPKKKRKVSKLEKFTNCYSLSKTLRFKAIPVGKTQENIDNKRLLVEDEKRAEDYKGVKKLLDRYYLSFINDVLHSIKLKNLNNYISLFRKKTRTEKENKELENLEINLRKEIAKAFKGNEGYKSLFKKDIIETILPEFLDDKDEIALVNSFNGFTTAFTGFFDNRENMFSEEAKSTSIAFRCINENLTRYISNMDIFEKVDAIFDKHEVQEIKEKILNSDYDVEDFFEGEFFNFVLTQEGIDVYNAIIGGFVTESGEKIKGLNEYINLYNQKTKQKLPKFKPLYKQVLSDRESLSFYGEGYTSDEEVLEVFRNTLNKNSEIFSSIKKLEKLFKNFDEYSSAGIFVKNGPAISTISKDIFGEWNVIRDKWNAEYDDIHLKKKAVVTEKYEDDRRKSFKKIGSFSLEQLQEYADADLSVVEKLKEIIIQKVDEIYKVYGSSEKLFDADFVLEKSLKKNDAVVAIMKDLLDSVKSFENYIKAFFGEGKETNRDESFYGDFVLAYDILLKVDHIYDAIRNYVTQKPYSKDKFKLYFQNPQFMGGWDKDKETDYRATILRYGSKYYLAIMDKKYAKCLQKIDKDDVNGNYEKINYKLLPGPNKMLPKVFFSKKWMAYYNPSEDIQKIYKNGTFKKGDMFNLNDCHKLIDFFKDSISRYPKWSNAYDFNFSETEKYKDIAGFYREVEEQGYKVSFESASKKEVDKLVEEGKLYMFQIYNKDFSDKSHGTPNLHTMYFKLLFDENNHGQIRLSGGAELFMRRASLKKEELVVHPANSPIANKNPDNPKKTTTLSYDVYKDKRFSEDQYELHIPIAINKCPKNIFKINTEVRVLLKHDDNPYVIGIDRGERNLLYIVVVDGKGNIVEQYSLNEIINNFNGIRIKTDYHSLLDKKEKERFEARQNWTSIENIKELKAGYISQVVHKICELVEKYDAVIALEDLNSGFKNSRVKVEKQVYQKFEKMLIDKLNYMVDKKSNPCATGGALKGYQITNKFESFKSMSTQNGFIFYIPAWLTSKIDPSTGFVNLLKTKYTSIADSKKFISSFDRIMYVPEEDLFEFALDYKNFSRTDADYIKKWKLYSYGNRIRIFRNPKKNNVFDWEEVCLTSAYKELFNKYGINYQQGDIRALLCEQSDKAFYSSFMALMSLMLQMANSITGRTDVDFLISPVKNSDGIFYDSRNYEAQENAILPKNADANGAYNIARKVLWAIGQFKKAEDEKLDKVKIAISNKEWLEYAQTSVKHSGSETPGTSESATPESTLNIEDEYRLHETSKEPDVSLGSTWLSDFPQAWAETGGMGLAVRQAPLIIPLKATSTPVSIKQYPMSQEARLGIKPHIQRLLDQGILVPCQSPWNTPLLPVKKPGTNDYRPVQDLREVNKRVEDIHPTVPNPYNLLSGLPPSHQWYTVLDLKDAFFCLRLHPTSQPLFAFEWRDPEMGISGQLTWTRLPQGFKNSPTLFNEALHRDLADFRIQHPDLILLQYVDDLLLAATSELDCQQGTRALLQTLGNLGYRASAKKAQICQKQVKYLGYLLKEGQRWLTEARKETVMGQPTPKTPRQLREFLGKAGFCRLFIPGFAEMAAPLYPLTKPGTLFNWGPDQQKAYQEIKQALLTAPALGLPDLTKPFELFVDEKQGYAKGVLTQKLGPWRRPVAYLSKKLDPVAAGWPPCLRMVAAIAVLTKDAGKLTMGQPLVILAPHAVEALVKQPPDRWLSNARMTHYQALLLDTDRVQFGPVVALNPATLLPLPEEGLQHNCLDILAEAHGTRPDLTDQPLPDADHTWYTDGSSLLQEGQRKAGAAVTTETEVIWAKALPAGTSAQRAELIALTQALKMAEGKKLNVYTDSRYAFATAHIHGEIYRRRGWLTSEGKEIKNKDEILALLKALFLPKRLSIIHCPGHQKGHSAEARGNRMADQAARKAAITETPDTSTLLIENSSPSGGSKRTADGSEFEPKKKRKVGSG

SEQ ID NO: 74 - protein, 1979 aa, Artificial
  Synthetic REDRAW editor
MKRTADGSEFESPKKKRKVSKLEKFTNCYSLSKTLRFKAIPVGKTQENIDNKRLLVEDEKRAEDYKGVKKLLDRYYLSFINDVLHSIKLKNLNNYISLFRKKTRTEKENKELENLEINLRKEIAKAFKGNEGYKSLFKKDIIETILPEFLDDKDEIALVNSFNGFTTAFTGFFDNRENMFSEEAKSTSIAFRCINENLTRYISNMDIFEKVDAIFDKHEVQEIKEKILNSDYDVEDFFEGEFFNFVLTQEGIDVYNAIIGGFVTESGEKIKGLNEYINLYNQKTKQKLPKFKPLYKQVLSDRESLSFYGEGYTSDEEVLEVFRNTLNKNSEIFSSIKKLEKLFKNFDEYSSAGIFVKNGPAISTISKDIFGEWNVIRDKWNAEYDDIHLKKKAVVTEKYEDDRRKSFKKIGSFSLEQLQEYADADLSVVEKLKEIIIQKVDEIYKVYGSSEKLFDADFVLEKSLKKNDAVVAIMKDLLDSVKSFENYIKAFFGEGKETNRDESFYGDFVLAYDILLKVDHIYDAIRNYVTQKPYSKDKFKLYFQNPQFMGGWDKDKETDYRATILRYGSKYYLAIMDKKYAKCLQKIDKDDVNGNYEKINYKLLPGPNKMLPKVFFSKKWMAYYNPSEDIQKIYKNGTFKKGDMFNLNDCHKLIDFFKDSISRYPKWSNAYDFNFSETEKYKDIAGFYREVEEQGYKVSFESASKKEVDKLVEEGKLYMFQIYNKDFSDKSHGTPNLHTMYFKLLFDENNHGQIRLSGGAELFMRRASLKKEELVVHPANSPIANKNPDNPKKTTTLSYDVYKDKRFSEDQYELHIPIAINKCPKNIFKINTEVRVLLKHDDNPYVIGIDRGERNLLYIVVVDGKGNIVEQYSLNEIINNFNGIRIKTDYHSLLDKKEKERFEARQNWTSIENIKELKAGYISQVVHKICELVEKYDAVIALEDLNSGFKNSRVKVEKQVYQKFEKMLIDKLNYMVDKKSNPCATGGALKGYQITNKFESFKSMSTQNGFIFYIPAWLTSKIDPSTGFVNLLKTKYTSIADSKKFISSFDRIMYVPEEDLFEFALDYKNFSRTDADYIKKWKLYSYGNRIRIFRNPKKNNVFDWEEVCLTSAYKELFNKYGINYQQGDIRALLCEQSDKAFYSSFMALMSLMLQMANSITGRTDVDFLISPVKNSDGIFYDSRNYEAQENAILPKNADANGAYNIARKVLWAIGQFKKAEDEKLDKVKIAISNKEWLEYAQTSVKHSGGSSGGSSGSETPGTSESATPESSGGSSGGSTLNIEDEYRLHETSKEPDVSLGSTWLSDFPQAWAETGGMGLAVRQAPLIIPLKATSTPVSIKQYPMSQEARLGIKPHIQRLLDQGILVPCQSPWNTPLLPVKKPGTNDYRPVQDLREVNKRVEDIHPTVPNPYNLLSGLPPSHQWYTVLDLKDAFFCLRLHPTSQPLFAFEWRDPEMGISGQLTWTRLPQGFKNSPTLFNEALHRDLADFRIQHPDLILLQYVDDLLLAATSELDCQQGTRALLQTLGNLGYRASAKKAQICQKQVKYLGYLLKEGQRWLTEARKETVMGQPTPKTPRQLREFLGKAGFCRLFIPGFAEMAAPLYPLTKPGTLFNWGPDQQKAYQEIKQALLTAPALGLPDLTKPFELFVDEKQGYAKGVLTQKLGPWRRPVAYLSKKLDPVAAGWPPCLRMVAAIAVLTKDAGKLTMGQPLVILAPHAVEALVKQPPDRWLSNARMTHYQALLLDTDRVQFGPVVALNPATLLPLPEEGLQHNCLDILAEAHGTRPDLTDQPLPDADHTWYTDGSSLLQEGQRKAGAAVTTETEVIWAKALPAGTSAQRAELIALTQALKMAEGKKLNVYTDSRYAFATAHIHGEIYRRRGWLTSEGKEIKNKDEILALLKALFLPKRLSIIHCPGHQKGHSAEARGNRMADQAARKAAITETPDTSTLLIENSSPSGGSKRTADGSEFEPKKKRKVGSG

SEQ ID NO: 75 - protein, 1963 aa, Artificial
  Synthetic REDRAW editor
MKRTADGSEFESPKKKRKVTLNIEDEYRLHETSKEPDVSLGSTWLSDFPQAWAETGGMGLAVRQAPLIIPLKATSTPVSIKQYPMSQEARLGIKPHIQRLLDQGILVPCQSPWNTPLLPVKKPGTNDYRPVQDLREVNKRVEDIHPTVPNPYNLLSGLPPSHQWYTVLDLKDAFFCLRLHPTSQPLFAFEWRDPEMGISGQLTWTRLPQGFKNSPTLFNEALHRDLADFRIQHPDLILLQYVDDLLLAATSELDCQQGTRALLQTLGNLGYRASAKKAQICQKQVKYLGYLLKEGQRWLTEARKETVMGQPTPKTPRQLREFLGKAGFCRLFIPGFAEMAAPLYPLTKPGTLFNWGPDQQKAYQEIKQALLTAPALGLPDLTKPFELFVDEKQGYAKGVLTQKLGPWRRPVAYLSKKLDPVAAGWPPCLRMVAAIAVLTKDAGKLTMGQPLVILAPHAVEALVKQPPDRWLSNARMTHYQALLLDTDRVQFGPVVALNPATLLPLPEEGLQHNCLDILAEAHGTRPDLTDQPLPDADHTWYTDGSSLLQEGQRKAGAAVTTETEVIWAKALPAGTSAQRAELIALTQALKMAEGKKLNVYTDSRYAFATAHIHGEIYRRRGWLTSEGKEIKNKDEILALLKALFLPKRLSIIHCPGHQKGHSAEARGNRMADQAARKAAITETPDTSTLLIENSSPSGSETPGTSESATPESSKLEKFTNCYSLSKTLRFKAIPVGKTQENIDNKRLLVEDEKRAEDYKGVKKLLDRYYLSFINDVLHSIKLKNLNNYISLFRKKTRTEKENKELENLEINLRKEIAKAFKGNEGYKSLFKKDIIETILPEFLDDKDEIALVNSFNGFTTAFTGFFDNRENMFSEEAKSTSIAFRCINENLTRYISNMDIFEKVDAIFDKHEVQEIKEKILNSDYDVEDFFEGEFFNFVLTQEGIDVYNAIIGGFVTESGEKIKGLNEYINLYNQKTKQKLPKFKPLYKQVLSDRESLSFYGEGYTSDEEVLEVFRNTLNKNSEIFSSIKKLEKLFKNFDEYSSAGIFVKNGPAISTISKDIFGEWNVIRDKWNAEYDDIHLKKKAVVTEKYEDDRRKSFKKIGSFSLEQLQEYADADLSVVEKLKEIIIQKVDEIYKVYGSSEKLFDADFVLEKSLKKNDAVVAIMKDLLDSVKSFENYIKAFFGEGKETNRDESFYGDFVLAYDILLKVDHIYDAIRNYVTQKPYSKDKFKLYFQNPQFMRGWDKDKETDYRATILRYGSKYYLAIMDKKYAKCLQKIDKDDVNGNYEKINYKLLPGPNKMLPRVFFSKKWMAYYNPSEDIQKIYKNGTFKKGDMFNLNDCHKLIDFFKDSISRYPKWSNAYDFNFSETEKYKDIAGFYREVEEQGYKVSFESASKKEVDKLVEEGKLYMFQIYNKDFSDKSHGTPNLHTMYFKLLFDENNHGQIRLSGGAELFMRRASLKKEELVVAPANSPIANKNPDNPKKTTTLSYDVYKDKRFSEDQYELHIPIAINKCPKNIFKINTEVRVLLKHDDNPYVIGIDRGERNLLYIVVVDGKGNIVEQYSLNEIINNFNGIRIKTDYHSLLDKKEKERFEARQNWTSIENIKELKAGYISQVVHKICELVEKYDAVIALEDLNSGFKNSRVKVEKQVYQKFEKMLIDKLNYMVDKKSNPCATGGALKGYQITNKFESFKSMSTQNGFIFYIPAWLTSKIDPSTGFVNLLKTKYTSIADSKKFISSFDRIMYVPEEDLFEFALDYKNFSRTDADYIKKWKLYSYGNRIRIFRNPKKNNVFDWEEVCLTSAYKELFNKYGINYQQGDIRALLCEQSDKAFYSSFMALMSLMLQMANSITGRTDVDFLISPVKNSDGIFYDSRNYEAQENAILPKNADANGAYNIARKVLWAIGQFKKAEDEKLDKVKIAISNKEWLEYAQTSVKHSGGSKRTADGSEFEPKKKRKVGSG

SEQ ID NO: 76 - protein, 1979 aa, Artificial
  Synthetic REDRAW editor
MKRTADGSEFESPKKKRKVTLNIEDEYRLHETSKEPDVSLGSTWLSDFPQAWAETGGMGLAVRQAPLIIPLKATSTPVSIKQYPMSQEARLGIKPHIQRLLDQGILVPCQSPWNTPLLPVKKPGTNDYRPVQDLREVNKRVEDIHPTVPNPYNLLSGLPPSHQWYTVLDLKDAFFCLRLHPTSQPLFAFEWRDPEMGISGQLTWTRLPQGFKNSPTLFNEALHRDLADFRIQHPDLILLQYVDDLLLAATSELDCQQGTRALLQTLGNLGYRASAKKAQICQKQVKYLGYLLKEGQRWLTEARKETVMGQPTPKTPRQLREFLGKAGFCRLFIPGFAEMAAPLYPLTKPGTLFNWGPDQQKAYQEIKQALLTAPALGLPDLTKPFELFVDEKQGYAKGVLTQKLGPWRRPVAYLSKKLDPVAAGWPPCLRMVAAIAVLTKDAGKLTMGQPLVILAPHAVEALVKQPPDRWLSNARMTHYQALLLDTDRVQFGPVVALNPATLLPLPEEGLQHNCLDILAEAHGTRPDLTDQPLPDADHTWYTDGSSLLQEGQRKAGAAVTTETEVIWAKALPAGTSAQRAELIALTQALKMAEGKKLNVYTDSRYAFATAHIHGEIYRRRGWLTSEGKEIKNKDEILALLKALFLPKRLSIIHCPGHQKGHSAEARGNRMADQAARKAAITETPDTSTLLIENSSPSGGSSGGSSGSETPGTSESATPESSGGSSGGSSKLEKFTNCYSLSKTLRFKAIPVGKTQENIDNKRLLVEDEKRAEDYKGVKKLLDRYYLSFINDVLHSIKLKNLNNYISLFRKKTRTEKENKELENLEINLRKEIAKAFKGNEGYKSLFKKDIIETILPEFLDDKDEIALVNSFNGFTTAFTGFFDNRENMFSEEAKSTSIAFRCINENLTRYISNMDIFEKVDAIFDKHEVQEIKEKILNSDYDVEDFFEGEFFNFVLTQEGIDVYNAIIGGFVTESGEKIKGLNEYINLYNQKTKQKLPKFKPLYKQVLSDRESLSFYGEGYTSDEEVLEVFRNTLNKNSEIFSSIKKLEKLFKNFDEYSSAGIFVKNGPAISTISKDIFGEWNVIRDKWNAEYDDIHLKKKAVVTEKYEDDRRKSFKKIGSFSLEQLQEYADADLSVVEKLKEIIIQKVDEIYKVYGSSEKLFDADFVLEKSLKKNDAVVAIMKDLLDSVKSFENYIKAFFGEGKETNRDESFYGDFVLAYDILLKVDHIYDAIRNYVTQKPYSKDKFKLYFQNPQFMRGWDKDKETDYRATILRYGSKYYLAIMDKKYAKCLQKIDKDDVNGNYEKINYKLLPGPNKMLPRVFFSKKWMAYYNPSEDIQKIYKNGTFKKGDMFNLNDCHKLIDFFKDSISRYPKWSNAYDFNFSETEKYKDIAGFYREVEEQGYKVSFESASKKEVDKLVEEGKLYMFQIYNKDFSDKSHGTPNLHTMYFKLLFDENNHGQIRLSGGAELFMRRASLKKEELVVAPANSPIANKNPDNPKKTTTLSYDVYKDKRFSEDQYELHIPIAINKCPKNIFKINTEVRVLLKHDDNPYVIGIDRGERNLLYIVVVDGKGNIVEQYSLNEIINNFNGIRIKTDYHSLLDKKEKERFEARQNWTSIENIKELKAGYISQVVHKICELVEKYDAVIALEDLNSGFKNSRVKVEKQVYQKFEKMLIDKLNYMVDKKSNPCATGGALKGYQITNKFESFKSMSTQNGFIFYIPAWLTSKIDPSTGFVNLLKTKYTSIADSKKFISSFDRIMYVPEEDLFEFALDYKNFSRTDADYIKKWKLYSYGNRIRIFRNPKKNNVFDWEEVCLTSAYKELFNKYGINYQQGDIRALLCEQSDKAFYSSFMALMSLMLQMANSITGRTDVDFLISPVKNSDGIFYDSRNYEAQENAILPKNADANGAYNIARKVLWAIGQFKKAEDEKLDKVKIAISNKEWLEYAQTSVKHSGGSKRTADGSEFEPKKKRKVGSG

SEQ ID NO: 77 - protein, 1963 aa, Artificial
  Synthetic REDRAW editor
MKRTADGSEFESPKKKRKVSKLEKFTNCYSLSKTLRFKAIPVGKTQENIDNKRLLVEDEKRAEDYKGVKKLLDRYYLSFINDVLHSIKLKNLNNYISLFRKKTRTEKENKELENLEINLRKEIAKAFKGNEGYKSLFKKDIIETILPEFLDDKDEIALVNSFNGFTTAFTGFFDNRENMFSEEAKSTSIAFRCINENLTRYISNMDIFEKVDAIFDKHEVQEIKEKILNSDYDVEDFFEGEFFNFVLTQEGIDVYNAIIGGFVTESGEKIKGLNEYINLYNQKTKQKLPKFKPLYKQVLSDRESLSFYGEGYTSDEEVLEVFRNTLNKNSEIFSSIKKLEKLFKNFDEYSSAGIFVKNGPAISTISKDIFGEWNVIRDKWNAEYDDIHLKKKAVVTEKYEDDRRKSFKKIGSFSLEQLQEYADADLSVVEKLKEIIIQKVDEIYKVYGSSEKLFDADFVLEKSLKKNDAVVAIMKDLLDSVKSFENYIKAFFGEGKETNRDESFYGDFVLAYDILLKVDHIYDAIRNYVTQKPYSKDKFKLYFQNPQFMRGWDKDKETDYRATILRYGSKYYLAIMDKKYAKCLQKIDKDDVNGNYEKINYKLLPGPNKMLPRVFFSKKWMAYYNPSEDIQKIYKNGTFKKGDMFNLNDCHKLIDFFKDSISRYPKWSNAYDFNFSETEKYKDIAGFYREVEEQGYKVSFESASKKEVDKLVEEGKLYMFQIYNKDFSDKSHGTPNLHTMYFKLLFDENNHGQIRLSGGAELFMRRASLKKEELVVAPANSPIANKNPDNPKKTTTLSYDVYKDKRFSEDQYELHIPIAINKCPKNIFKINTEVRVLLKHDDNPYVIGIDRGERNLLYIVVVDGKGNIVEQYSLNEIINNFNGIRIKTDYHSLLDKKEKERFEARQNWTSIENIKELKAGYISQVVHKICELVEKYDAVIALEDLNSGFKNSRVKVEKQVYQKFEKMLIDKLNYMVDKKSNPCATGGALKGYQITNKFESFKSMSTQNGFIFYIPAWLTSKIDPSTGFVNLLKTKYTSIADSKKFISSFDRIMYVPEEDLFEFALDYKNFSRTDADYIKKWKLYSYGNRIRIFRNPKKNNVFDWEEVCLTSAYKELFNKYGINYQQGDIRALLCEQSDKAFYSSFMALMSLMLQMANSITGRTDVDFLISPVKNSDGIFYDSRNYEAQENAILPKNADANGAYNIARKVLWAIGQFKKAEDEKLDKVKIAISNKEWLEYAQTSVKHSGSETPGTSESATPESTLNIEDEYRLHETSKEPDVSLGSTWLSDFPQAWAETGGMGLAVRQAPLIIPLKATSTPVSIKQYPMSQEARLGIKPHIQRLLDQGILVPCQSPWNTPLLPVKKPGTNDYRPVQDLREVNKRVEDIHPTVPNPYNLLSGLPPSHQWYTVLDLKDAFFCLRLHPTSQPLFAFEWRDPEMGISGQLTWTRLPQGFKNSPTLFNEALHRDLADFRIQHPDLILLQYVDDLLLAATSELDCQQGTRALLQTLGNLGYRASAKKAQICQKQVKYLGYLLKEGQRWLTEARKETVMGQPTPKTPRQLREFLGKAGFCRLFIPGFAEMAAPLYPLTKPGTLFNWGPDQQKAYQEIKQALLTAPALGLPDLTKPFELFVDEKQGYAKGVLTQKLGPWRRPVAYLSKKLDPVAAGWPPCLRMVAAIAVLTKDAGKLTMGQPLVILAPHAVEALVKQPPDRWLSNARMTHYQALLLDTDRVQFGPVVALNPATLLPLPEEGLQHNCLDILAEAHGTRPDLTDQPLPDADHTWYTDGSSLLQEGQRKAGAAVTTETEVIWAKALPAGTSAQRAELIALTQALKMAEGKKLNVYTDSRYAFATAHIHGEIYRRRGWLTSEGKEIKNKDEILALLKALFLPKRLSIIHCPGHQKGHSAEARGNRMADQAARKAAITETPDTSTLLIENSSPSGGSKRTADGSEFEPKKKRKVGSG

SEQ ID NO: 78 - protein, 1979 aa, Artificial
  Synthetic REDRAW editor
MKRTADGSEFESPKKKRKVSKLEKFTNCYSLSKTLRFKAIPVGKTQENIDNKRLLVEDEKRAEDYKGVKKLLDRYYLSFINDVLHSIKLKNLNNYISLFRKKTRTEKENKELENLEINLRKEIAKAFKGNEGYKSLFKKDIIETILPEFLDDKDEIALVNSFNGFTTAFTGFFDNRENMFSEEAKSTSIAFRCINENLTRYISNMDIFEKVDAIFDKHEVQEIKEKILNSDYDVEDFFEGEFFNFVLTQEGIDVYNAIIGGFVTESGEKIKGLNEYINLYNQKTKQKLPKFKPLYKQVLSDRESLSFYGEGYTSDEEVLEVFRNTLNKNSEIFSSIKKLEKLFKNFDEYSSAGIFVKNGPAISTISKDIFGEWNVIRDKWNAEYDDIHLKKKAVVTEKYEDDRRKSFKKIGSFSLEQLQEYADADLSVVEKLKEIIIQKVDEIYKVYGSSEKLFDADFVLEKSLKKNDAVVAIMKDLLDSVKSFENYIKAFFGEGKETNRDESFYGDFVLAYDILLKVDHIYDAIRNYVTQKPYSKDKFKLYFQNPQFMRGWDKDKETDYRATILRYGSKYYLAIMDKKYAKCLQKIDKDDVNGNYEKINYKLLPGPNKMLPRVFFSKKWMAYYNPSEDIQKIYKNGTFKKGDMFNLNDCHKLIDFFKDSISRYPKWSNAYDFNFSETEKYKDIAGFYREVEEQGYKVSFESASKKEVDKLVEEGKLYMFQIYNKDFSDKSHGTPNLHTMYFKLLFDENNHGQIRLSGGAELFMRRASLKKEELVVAPANSPIANKNPDNPKKTTTLSYDVYKDKRFSEDQYELHIPIAINKCPKNIFKINTEVRVLLKHDDNPYVIGIDRGERNLLYIVVVDGKGNIVEQYSLNEIINNFNGIRIKTDYHSLLDKKEKERFEARQNWTSIENIKELKAGYISQVVHKICELVEKYDAVIALEDLNSGFKNSRVKVEKQVYQKFEKMLIDKLNYMVDKKSNPCATGGALKGYQITNKFESFKSMSTQNGFIFYIPAWLTSKIDPSTGFVNLLKTKYTSIADSKKFISSFDRIMYVPEEDLFEFALDYKNFSRTDADYIKKWKLYSYGNRIRIFRNPKKNNVFDWEEVCLTSAYKELFNKYGINYQQGDIRALLCEQSDKAFYSSFMALMSLMLQMANSITGRTDVDFLISPVKNSDGIFYDSRNYEAQENAILPKNADANGAYNIARKVLWAIGQFKKAEDEKLDKVKIAISNKEWLEYAQTSVKHSGGSSGGSSGSETPGTSESATPESSGGSSGGSTLNIEDEYRLHETSKEPDVSLGSTWLSDFPQAWAETGGMGLAVRQAPLIIPLKATSTPVSIKQYPMSQEARLGIKPHIQRLLDQGILVPCQSPWNTPLLPVKKPGTNDYRPVQDLREVNKRVEDIHPTVPNPYNLLSGLPPSHQWYTVLDLKDAFFCLRLHPTSQPLFAFEWRDPEMGISGQLTWTRLPQGFKNSPTLFNEALHRDLADFRIQHPDLILLQYVDDLLLAATSELDCQQGTRALLQTLGNLGYRASAKKAQICQKQVKYLGYLLKEGQRWLTEARKETVMGQPTPKTPRQLREFLGKAGFCRLFIPGFAEMAAPLYPLTKPGTLFNWGPDQQKAYQEIKQALLTAPALGLPDLTKPFELFVDEKQGYAKGVLTQKLGPWRRPVAYLSKKLDPVAAGWPPCLRMVAAIAVLTKDAGKLTMGQPLVILAPHAVEALVKQPPDRWLSNARMTHYQALLLDTDRVQFGPVVALNPATLLPLPEEGLQHNCLDILAEAHGTRPDLTDQPLPDADHTWYTDGSSLLQEGQRKAGAAVTTETEVIWAKALPAGTSAQRAELIALTQALKMAEGKKLNVYTDSRYAFATAHIHGEIYRRRGWLTSEGKEIKNKDEILALLKALFLPKRLSIIHCPGHQKGHSAEARGNRMADQAARKAAITETPDTSTLLIENSSPSGGSKRTADGSEFEPKKKRKVGSG

SEQ ID NO: 79 - protein, 1963 aa, Artificial
  Synthetic REDRAW editor
MKRTADGSEFESPKKKRKVTLNIEDEYRLHETSKEPDVSLGSTWLSDFPQAWAETGGMGLAVRQAPLIIPLKATSTPVSIKQYPMSQEARLGIKPHIQRLLDQGILVPCQSPWNTPLLPVKKPGTNDYRPVQDLREVNKRVEDIHPTVPNPYNLLSGLPPSHQWYTVLDLKDAFFCLRLHPTSQPLFAFEWRDPEMGISGQLTWTRLPQGFKNSPTLFNEALHRDLADFRIQHPDLILLQYVDDLLLAATSELDCQQGTRALLQTLGNLGYRASAKKAQICQKQVKYLGYLLKEGQRWLTEARKETVMGQPTPKTPRQLREFLGKAGFCRLFIPGFAEMAAPLYPLTKPGTLFNWGPDQQKAYQEIKQALLTAPALGLPDLTKPFELFVDEKQGYAKGVLTQKLGPWRRPVAYLSKKLDPVAAGWPPCLRMVAAIAVLTKDAGKLTMGQPLVILAPHAVEALVKQPPDRWLSNARMTHYQALLLDTDRVQFGPVVALNPATLLPLPEEGLQHNCLDILAEAHGTRPDLTDQPLPDADHTWYTDGSSLLQEGQRKAGAAVTTETEVIWAKALPAGTSAQRAELIALTQALKMAEGKKLNVYTDSRYAFATAHIHGEIYRRRGWLTSEGKEIKNKDEILALLKALFLPKRLSIIHCPGHQKGHSAEARGNRMADQAARKAAITETPDTSTLLIENSSPSGSETPGTSESATPESSKLEKFTNCYSLSKTLRFKAIPVGKTQENIDNKRLLVEDEKRAEDYKGVKKLLDRYYLSFINDVLHSIKLKNLNNYISLFRKKTRTEKENKELENLEINLRKEIAKAFKGNEGYKSLFKKDIIETILPEFLDDKDEIALVNSFNGFTTAFTGFFDNRENMFSEEAKSTSIAFRCINENLTRYISNMDIFEKVDAIFDKHEVQEIKEKILNSDYDVEDFFEGEFFNFVLTQEGIDVYNAIIGGFVTESGEKIKGLNEYINLYNQKTKQKLPKFKPLYKQVLSDRESLSFYGEGYTSDEEVLEVFRNTLNKNSEIFSSIKKLEKLFKNFDEYSSAGIFVKNGPAISTISKDIFGEWNVIRDKWNAEYDDIHLKKKAVVTEKYEDDRRKSFKKIGSFSLEQLQEYADADLSVVEKLKEIIIQKVDEIYKVYGSSEKLFDADFVLEKSLKKNDAVVAIMKDLLDSVKSFENYIKAFFGEGKETNRDESFYGDFVLAYDILLKVDHIYDAIRNYVTQKPYSKDKFKLYFQNPQFMRGWDKDVETDYRATILRYGSKYYLAIMDKKYAKCLQKIDKDDVNGNYEKINYKLLPGPNKMLPRVFFSKKWMAYYNPSEDIQKIYKNGTFKKGDMFNLNDCHKLIDFFKDSISRYPKWSNAYDFNFSETEKYKDIAGFYREVEEQGYKVSFESASKKEVDKLVEEGKLYMFQIYNKDFSDKSHGTPNLHTMYFKLLFDENNHGQIRLSGGAELFMRRASLKKEELVVAPANSPIANKNPDNPKKTTTLSYDVYKDKRFSEDQYELHIPIAINKCPKNIFKINTEVRVLLKHDDNPYVIGIDRGERNLLYIVVVDGKGNIVEQYSLNEIINNFNGIRIKTDYHSLLDKKEKERFEARQNWTSIENIKELKAGYISQVVHKICELVEKYDAVIALEDLNSGFKNSRVKVEKQVYQKFEKMLIDKLNYMVDKKSNPCATGGALKGYQITNKFESFKSMSTQNGFIFYIPAWLTSKIDPSTGFVNLLKTKYTSIADSKKFISSFDRIMYVPEEDLFEFALDYKNFSRTDADYIKKWKLYSYGNRIRIFRNPKKNNVFDWEEVCLTSAYKELFNKYGINYQQGDIRALLCEQSDKAFYSSFMALMSLMLQMANSITGRTDVDFLISPVKNSDGIFYDSRNYEAQENAILPKNADANGAYNIARKVLWAIGQFKKAEDEKLDKVKIAISNKEWLEYAQTSVKHSGGSKRTADGSEFEPKKKRKVGSG

SEQ ID NO: 80 - protein, 1979 aa, Artificial
  Synthetic REDRAW editor
MKRTADGSEFESPKKKRKVTLNIEDEYRLHETSKEPDVSLGSTWLSDFPQAWAETGGMGLAVRQAPLIIPLKATSTPVSIKQYPMSQEARLGIKPHIQRLLDQGILVPCQSPWNTPLLPVKKPGTNDYRPVQDLREVNKRVEDIHPTVPNPYNLLSGLPPSHQWYTVLDLKDAFFCLRLHPTSQPLFAFEWRDPEMGISGQLTWTRLPQGFKNSPTLFNEALHRDLADFRIQHPDLILLQYVDDLLLAATSELDCQQGTRALLQTLGNLGYRASAKKAQICQKQVKYLGYLLKEGQRWLTEARKETVMGQPTPKTPRQLREFLGKAGFCRLFIPGFAEMAAPLYPLTKPGTLFNWGPDQQKAYQEIKQALLTAPALGLPDLTKPFELFVDEKQGYAKGVLTQKLGPWRRPVAYLSKKLDPVAAGWPPCLRMVAAIAVLTKDAGKLTMGQPLVILAPHAVEALVKQPPDRWLSNARMTHYQALLLDTDRVQFGPVVALNPATLLPLPEEGLQHNCLDILAEAHGTRPDLTDQPLPDADHTWYTDGSSLLQEGQRKAGAAVTTETEVIWAKALPAGTSAQRAELIALTQALKMAEGKKLNVYTDSRYAFATAHIHGEIYRRRGWLTSEGKEIKNKDEILALLKALFLPKRLSIIHCPGHQKGHSAEARGNRMADQAARKAAITETPDTSTLLIENSSPSGGSSGGSSGSETPGTSESATPESSGGSSGGSSKLEKFTNCYSLSKTLRFKAIPVGKTQENIDNKRLLVEDEKRAEDYKGVKKLLDRYYLSFINDVLHSIKLKNLNNYISLFRKKTRTEKENKELENLEINLRKEIAKAFKGNEGYKSLFKKDIIETILPEFLDDKDEIALVNSFNGFTTAFTGFFDNRENMFSEEAKSTSIAFRCINENLTRYISNMDIFEKVDAIFDKHEVQEIKEKILNSDYDVEDFFEGEFFNFVLTQEGIDVYNAIIGGFVTESGEKIKGLNEYINLYNQKTKQKLPKFKPLYKQVLSDRESLSFYGEGYTSDEEVLEVFRNTLNKNSEIFSSIKKLEKLFKNFDEYSSAGIFVKNGPAISTISKDIFGEWNVIRDKWNAEYDDIHLKKKAVVTEKYEDDRRKSFKKIGSFSLEQLQEYADADLSVVEKLKEIIIQKVDEIYKVYGSSEKLFDADFVLEKSLKKNDAVVAIMKDLLDSVKSFENYIKAFFGEGKETNRDESFYGDFVLAYDILLKVDHIYDAIRNYVTQKPYSKDKFKLYFQNPQFMRGWDKDVETDYRATILRYGSKYYLAIMDKKYAKCLQKIDKDDVNGNYEKINYKLLPGPNKMLPRVFFSKKWMAYYNPSEDIQKIYKNGTFKKGDMFNLNDCHKLIDFFKDSISRYPKWSNAYDFNFSETEKYKDIAGFYREVEEQGYKVSFESASKKEVDKLVEEGKLYMFQIYNKDFSDKSHGTPNLHTMYFKLLFDENNHGQIRLSGGAELFMRRASLKKEELVVAPANSPIANKNPDNPKKTTTLSYDVYKDKRFSEDQYELHIPIAINKCPKNIFKINTEVRVLLKHDDNPYVIGIDRGERNLLYIVVVDGKGNIVEQYSLNEIINNFNGIRIKTDYHSLLDKKEKERFEARQNWTSIENIKELKAGYISQVVHKICELVEKYDAVIALEDLNSGFKNSRVKVEKQVYQKFEKMLIDKLNYMVDKKSNPCATGGALKGYQITNKFESFKSMSTQNGFIFYIPAWLTSKIDPSTGFVNLLKTKYTSIADSKKFISSFDRIMYVPEEDLFEFALDYKNFSRTDADYIKKWKLYSYGNRIRIFRNPKKNNVFDWEEVCLTSAYKELFNKYGINYQQGDIRALLCEQSDKAFYSSFMALMSLMLQMANSITGRTDVDFLISPVKNSDGIFYDSRNYEAQENAILPKNADANGAYNIARKVLWAIGQFKKAEDEKLDKVKIAISNKEWLEYAQTSVKHSGGSKRTADGSEFEPKKKRKVGSG

SEQ ID NO: 81 - protein, 1963 aa, Artificial
  Synthetic REDRAW editor
MKRTADGSEFESPKKKRKVSKLEKFTNCYSLSKTLRFKAIPVGKTQENIDNKRLLVEDEKRAEDYKGVKKLLDRYYLSFINDVLHSIKLKNLNNYISLFRKKTRTEKENKELENLEINLRKEIAKAFKGNEGYKSLFKKDIIETILPEFLDDKDEIALVNSFNGFTTAFTGFFDNRENMFSEEAKSTSIAFRCINENLTRYISNMDIFEKVDAIFDKHEVQEIKEKILNSDYDVEDFFEGEFFNFVLTQEGIDVYNAIIGGFVTESGEKIKGLNEYINLYNQKTKQKLPKFKPLYKQVLSDRESLSFYGEGYTSDEEVLEVFRNTLNKNSEIFSSIKKLEKLFKNFDEYSSAGIFVKNGPAISTISKDIFGEWNVIRDKWNAEYDDIHLKKKAVVTEKYEDDRRKSFKKIGSFSLEQLQEYADADLSVVEKLKEIIIQKVDEIYKVYGSSEKLFDADFVLEKSLKKNDAVVAIMKDLLDSVKSFENYIKAFFGEGKETNRDESFYGDFVLAYDILLKVDHIYDAIRNYVTQKPYSKDKFKLYFQNPQFMRGWDKDVETDYRATILRYGSKYYLAIMDKKYAKCLQKIDKDDVNGNYEKINYKLLPGPNKMLPRVFFSKKWMAYYNPSEDIQKIYKNGTFKKGDMFNLNDCHKLIDFFKDSISRYPKWSNAYDFNFSETEKYKDIAGFYREVEEQGYKVSFESASKKEVDKLVEEGKLYMFQIYNKDFSDKSHGTPNLHTMYFKLLFDENNHGQIRLSGGAELFMRRASLKKEELVVAPANSPIANKNPDNPKKTTTLSYDVYKDKRFSEDQYELHIPIAINKCPKNIFKINTEVRVLLKHDDNPYVIGIDRGERNLLYIVVVDGKGNIVEQYSLNEIINNFNGIRIKTDYHSLLDKKEKERFEARQNWTSIENIKELKAGYISQVVHKICELVEKYDAVIALEDLNSGFKNSRVKVEKQVYQKFEKMLIDKLNYMVDKKSNPCATGGALKGYQITNKFESFKSMSTQNGFIFYIPAWLTSKIDPSTGFVNLLKTKYTSIADSKKFISSFDRIMYVPEEDLFEFALDYKNFSRTDADYIKKWKLYSYGNRIRIFRNPKKNNVFDWEEVCLTSAYKELFNKYGINYQQGDIRALLCEQSDKAFYSSFMALMSLMLQMANSITGRTDVDFLISPVKNSDGIFYDSRNYEAQENAILPKNADANGAYNIARKVLWAIGQFKKAEDEKLDKVKIAISNKEWLEYAQTSVKHSGSETPGTSESATPESTLNIEDEYRLHETSKEPDVSLGSTWLSDFPQAWAETGGMGLAVRQAPLIIPLKATSTPVSIKQYPMSQEARLGIKPHIQRLLDQGILVPCQSPWNTPLLPVKKPGTNDYRPVQDLREVNKRVEDIHPTVPNPYNLLSGLPPSHQWYTVLDLKDAFFCLRLHPTSQPLFAFEWRDPEMGISGQLTWTRLPQGFKNSPTLFNEALHRDLADFRIQHPDLILLQYVDDLLLAATSELDCQQGTRALLQTLGNLGYRASAKKAQICQKQVKYLGYLLKEGQRWLTEARKETVMGQPTPKTPRQLREFLGKAGFCRLFIPGFAEMAAPLYPLTKPGTLFNWGPDQQKAYQEIKQALLTAPALGLPDLTKPFELFVDEKQGYAKGVLTQKLGPWRRPVAYLSKKLDPVAAGWPPCLRMVAAIAVLTKDAGKLTMGQPLVILAPHAVEALVKQPPDRWLSNARMTHYQALLLDTDRVQFGPVVALNPATLLPLPEEGLQHNCLDILAEAHGTRPDLTDQPLPDADHTWYTDGSSLLQEGQRKAGAAVTTETEVIWAKALPAGTSAQRAELIALTQALKMAEGKKLNVYTDSRYAFATAHIHGEIYRRRGWLTSEGKEIKNKDEILALLKALFLPKRLSIIHCPGHQKGHSAEARGNRMADQAARKAAITETPDTSTLLIENSSPSGGSKRTADGSEFEPKKKRKVGSG

SEQ ID NO: 82 - protein, 1979 aa, Artificial
  Synthetic REDRAW editor
MKRTADGSEFESPKKKRKVSKLEKFTNCYSLSKTLRFKAIPVGKTQENIDNKRLLVEDEKRAEDYKGVKKLLDRYYLSFINDVLHSIKLKNLNNYISLFRKKTRTEKENKELENLEINLRKEIAKAFKGNEGYKSLFKKDIIETILPEFLDDKDEIALVNSFNGFTTAFTGFFDNRENMFSEEAKSTSIAFRCINENLTRYISNMDIFEKVDAIFDKHEVQEIKEKILNSDYDVEDFFEGEFFNFVLTQEGIDVYNAIIGGFVTESGEKIKGLNEYINLYNQKTKQKLPKFKPLYKQVLSDRESLSFYGEGYTSDEEVLEVFRNTLNKNSEIFSSIKKLEKLFKNFDEYSSAGIFVKNGPAISTISKDIFGEWNVIRDKWNAEYDDIHLKKKAVVTEKYEDDRRKSFKKIGSFSLEQLQEYADADLSVVEKLKEIIIQKVDEIYKVYGSSEKLFDADFVLEKSLKKNDAVVAIMKDLLDSVKSFENYIKAFFGEGKETNRDESFYGDFVLAYDILLKVDHIYDAIRNYVTQKPYSKDKFKLYFQNPQFMRGWDKDVETDYRATILRYGSKYYLAIMDKKYAKCLQKIDKDDVNGNYEKINYKLLPGPNKMLPRVFFSKKWMAYYNPSEDIQKIYKNGTFKKGDMFNLNDCHKLIDFFKDSISRYPKWSNAYDFNFSETEKYKDIAGFYREVEEQGYKVSFESASKKEVDKLVEEGKLYMFQIYNKDFSDKSHGTPNLHTMYFKLLFDENNHGQIRLSGGAELFMRRASLKKEELVVAPANSPIANKNPDNPKKTTTLSYDVYKDKRFSEDQYELHIPIAINKCPKNIFKINTEVRVLLKHDDNPYVIGIDRGERNLLYIVVVDGKGNIVEQYSLNEIINNFNGIRIKTDYHSLLDKKEKERFEARQNWTSIENIKELKAGYISQVVHKICELVEKYDAVIALEDLNSGFKNSRVKVEKQVYQKFEKMLIDKLNYMVDKKSNPCATGGALKGYQITNKFESFKSMSTQNGFIFYIPAWLTSKIDPSTGFVNLLKTKYTSIADSKKFISSFDRIMYVPEEDLFEFALDYKNFSRTDADYIKKWKLYSYGNRIRIFRNPKKNNVFDWEEVCLTSAYKELFNKYGINYQQGDIRALLCEQSDKAFYSSFMALMSLMLQMANSITGRTDVDFLISPVKNSDGIFYDSRNYEAQENAILPKNADANGAYNIARKVLWAIGQFKKAEDEKLDKVKIAISNKEWLEYAQTSVKHSGGSSGGSSGSETPGTSESATPESSGGSSGGSTLNIEDEYRLHETSKEPDVSLGSTWLSDFPQAWAETGGMGLAVRQAPLIIPLKATSTPVSIKQYPMSQEARLGIKPHIQRLLDQGILVPCQSPWNTPLLPVKKPGTNDYRPVQDLREVNKRVEDIHPTVPNPYNLLSGLPPSHQWYTVLDLKDAFFCLRLHPTSQPLFAFEWRDPEMGISGQLTWTRLPQGFKNSPTLFNEALHRDLADFRIQHPDLILLQYVDDLLLAATSELDCQQGTRALLQTLGNLGYRASAKKAQICQKQVKYLGYLLKEGQRWLTEARKETVMGQPTPKTPRQLREFLGKAGFCRLFIPGFAEMAAPLYPLTKPGTLFNWGPDQQKAYQEIKQALLTAPALGLPDLTKPFELFVDEKQGYAKGVLTQKLGPWRRPVAYLSKKLDPVAAGWPPCLRMVAAIAVLTKDAGKLTMGQPLVILAPHAVEALVKQPPDRWLSNARMTHYQALLLDTDRVQFGPVVALNPATLLPLPEEGLQHNCLDILAEAHGTRPDLTDQPLPDADHTWYTDGSSLLQEGQRKAGAAVTTETEVIWAKALPAGTSAQRAELIALTQALKMAEGKKLNVYTDSRYAFATAHIHGEIYRRRGWLTSEGKEIKNKDEILALLKALFLPKRLSIIHCPGHQKGHSAEARGNRMADQAARKAAITETPDTSTLLIENSSPSGGSKRTADGSEFEPKKKRKVGSG

SEQ ID NO: 83 - protein, 1963 aa, Artificial
  Synthetic REDRAW editor
MKRTADGSEFESPKKKRKVTLNIEDEYRLHETSKEPDVSLGSTWLSDFPQAWAETGGMGLAVRQAPLIIPLKATSTPVSIKQYPMSQEARLGIKPHIQRLLDQGILVPCQSPWNTPLLPVKKPGTNDYRPVQDLREVNKRVEDIHPTVPNPYNLLSGLPPSHQWYTVLDLKDAFFCLRLHPTSQPLFAFEWRDPEMGISGQLTWTRLPQGFKNSPTLFNEALHRDLADFRIQHPDLILLQYVDDLLLAATSELDCQQGTRALLQTLGNLGYRASAKKAQICQKQVKYLGYLLKEGQRWLTEARKETVMGQPTPKTPRQLREFLGKAGFCRLFIPGFAEMAAPLYPLTKPGTLFNWGPDQQKAYQEIKQALLTAPALGLPDLTKPFELFVDEKQGYAKGVLTQKLGPWRRPVAYLSKKLDPVAAGWPPCLRMVAAIAVLTKDAGKLTMGQPLVILAPHAVEALVKQPPDRWLSNARMTHYQALLLDTDRVQFGPVVALNPATLLPLPEEGLQHNCLDILAEAHGTRPDLTDQPLPDADHTWYTDGSSLLQEGQRKAGAAVTTETEVIWAKALPAGTSAQRAELIALTQALKMAEGKKLNVYTDSRYAFATAHIHGEIYRRRGWLTSEGKEIKNKDEILALLKALFLPKRLSIIHCPGHQKGHSAEARGNRMADQAARKAAITETPDTSTLLIENSSPSGSETPGTSESATPESSKLEKFTNCYSLSKTLRFKAIPVGKTQENIDNKRLLVEDEKRAEDYKGVKKLLDRYYLSFINDVLHSIKLKNLNNYISLFRKKTRTEKENKELENLEINLRKEIAKAFKGNEGYKSLFKKDIIETILPEFLDDKDEIALVNSFNGFTTAFTGFFDNRENMFSEEAKSTSIAFRCINENLTRYISNMDIFEKVDAIFDKHEVQEIKEKILNSDYDVEDFFEGEFFNFVLTQEGIDVYNAIIGGFVTESGEKIKGLNEYINLYNQKTKQKLPKFKPLYKQVLSDRESLSFYGEGYTSDEEVLEVFRNTLNKNSEIFSSIKKLEKLFKNFDEYSSAGIFVKNGPAISTISKDIFGEWNVIRDKWNAEYDDIHLKKKAVVTEKYEDDRRKSFKKIGSFSLEQLQEYADADLSVVEKLKEIIIQKVDEIYKVYGSSEKLFDADFVLEKSLKKNDAVVAIMKDLLDSVKSFENYIKAFFGEGKETNRDESFYGDFVLAYDILLKVDHIYDAIRNYVTQKPYSKDKFKLYFQNPQFMGGWDKDKETDYRATILRYGSKYYLAIMDKKYAKCLQKIDKDDVNGNYEKINYKLLPGPNKMLPKVFFSKKWMAYYNPSEDIQKIYKNGTFKKGDMFNLNDCHKLIDFFKDSISRYPKWSNAYDFNFSETEKYKDIAGFYREVEEQGYKVSFESASKKEVDKLVEEGKLYMFQIYNKDFSDKSHGTPNLHTMYFKLLFDENNHGQIRLSGGAELFMRRASLKKEELVVAPANSPIANKNPDNPKKTTTLSYDVYKDKRFSEDQYELHIPIAINKCPKNIFKINTEVRVLLKHDDNPYVIGIDRGERNLLYIVVVDGKGNIVEQYSLNEIINNFNGIRIKTDYHSLLDKKEKERFEARQNWTSIENIKELKAGYISQVVHKICELVEKYDAVIALEDLNSGFKNSRVKVEKQVYQKFEKMLIDKLNYMVDKKSNPCATGGALKGYQITNKFESFKSMSTQNGFIFYIPAWLTSKIDPSTGFVNLLKTKYTSIADSKKFISSFDRIMYVPEEDLFEFALDYKNFSRTDADYIKKWKLYSYGNRIRIFRNPKKNNVFDWEEVCLTSAYKELFNKYGINYQQGDIRALLCEQSDKAFYSSFMALMSLMLQMANSITGRTDVDFLISPVKNSDGIFYDSRNYEAQENAILPKNADANGAYNIARKVLWAIGQFKKAEDEKLDKVKIAISNKEWLEYAQTSVKHSGGSKRTADGSEFEPKKKRKVGSG

SEQ ID NO: 84 - protein, 1979 aa, Artificial
  Synthetic REDRAW editor
MKRTADGSEFESPKKKRKVTLNIEDEYRLHETSKEPDVSLGSTWLSDFPQAWAETGGMGLAVRQAPLIIPLKATSTPVSIKQYPMSQEARLGIKPHIQRLLDQGILVPCQSPWNTPLLPVKKPGTNDYRPVQDLREVNKRVEDIHPTVPNPYNLLSGLPPSHQWYTVLDLKDAFFCLRLHPTSQPLFAFEWRDPEMGISGQLTWTRLPQGFKNSPTLFNEALHRDLADFRIQHPDLILLQYVDDLLLAATSELDCQQGTRALLQTLGNLGYRASAKKAQICQKQVKYLGYLLKEGQRWLTEARKETVMGQPTPKTPRQLREFLGKAGFCRLFIPGFAEMAAPLYPLTKPGTLFNWGPDQQKAYQEIKQALLTAPALGLPDLTKPFELFVDEKQGYAKGVLTQKLGPWRRPVAYLSKKLDPVAAGWPPCLRMVAAIAVLTKDAGKLTMGQPLVILAPHAVEALVKQPPDRWLSNARMTHYQALLLDTDRVQFGPVVALNPATLLPLPEEGLQHNCLDILAEAHGTRPDLTDQPLPDADHTWYTDGSSLLQEGQRKAGAAVTTETEVIWAKALPAGTSAQRAELIALTQALKMAEGKKLNVYTDSRYAFATAHIHGEIYRRRGWLTSEGKEIKNKDEILALLKALFLPKRLSIIHCPGHQKGHSAEARGNRMADQAARKAAITETPDTSTLLIENSSPSGGSSGGSSGSETPGTSESATPESSGGSSGGSSKLEKFTNCYSLSKTLRFKAIPVGKTQENIDNKRLLVEDEKRAEDYKGVKKLLDRYYLSFINDVLHSIKLKNLNNYISLFRKKTRTEKENKELENLEINLRKEIAKAFKGNEGYKSLFKKDIIETILPEFLDDKDEIALVNSFNGFTTAFTGFFDNRENMFSEEAKSTSIAFRCINENLTRYISNMDIFEKVDAIFDKHEVQEIKEKILNSDYDVEDFFEGEFFNFVLTQEGIDVYNAIIGGFVTESGEKIKGLNEYINLYNQKTKQKLPKFKPLYKQVLSDRESLSFYGEGYTSDEEVLEVFRNTLNKNSEIFSSIKKLEKLFKNFDEYSSAGIFVKNGPAISTISKDIFGEWNVIRDKWNAEYDDIHLKKKAVVTEKYEDDRRKSFKKIGSFSLEQLQEYADADLSVVEKLKEIIIQKVDEIYKVYGSSEKLFDADFVLEKSLKKNDAVVAIMKDLLDSVKSFENYIKAFFGEGKETNRDESFYGDFVLAYDILLKVDHIYDAIRNYVTQKPYSKDKFKLYFQNPQFMGGWDKDKETDYRATILRYGSKYYLAIMDKKYAKCLQKIDKDDVNGNYEKINYKLLPGPNKMLPKVFFSKKWMAYYNPSEDIQKIYKNGTFKKGDMFNLNDCHKLIDFFKDSISRYPKWSNAYDFNFSETEKYKDIAGFYREVEEQGYKVSFESASKKEVDKLVEEGKLYMFQIYNKDFSDKSHGTPNLHTMYFKLLFDENNHGQIRLSGGAELFMRRASLKKEELVVAPANSPIANKNPDNPKKTTTLSYDVYKDKRFSEDQYELHIPIAINKCPKNIFKINTEVRVLLKHDDNPYVIGIDRGERNLLYIVVVDGKGNIVEQYSLNEIINNFNGIRIKTDYHSLLDKKEKERFEARQNWTSIENIKELKAGYISQVVHKICELVEKYDAVIALEDLNSGFKNSRVKVEKQVYQKFEKMLIDKLNYMVDKKSNPCATGGALKGYQITNKFESFKSMSTQNGFIFYIPAWLTSKIDPSTGFVNLLKTKYTSIADSKKFISSFDRIMYVPEEDLFEFALDYKNFSRTDADYIKKWKLYSYGNRIRIFRNPKKNNVFDWEEVCLTSAYKELFNKYGINYQQGDIRALLCEQSDKAFYSSFMALMSLMLQMANSITGRTDVDFLISPVKNSDGIFYDSRNYEAQENAILPKNADANGAYNIARKVLWAIGQFKKAEDEKLDKVKIAISNKEWLEYAQTSVKHSGGSKRTADGSEFEPKKKRKVGSG

SEQ ID NO: 85 - protein, 1963 aa, Artificial
  Synthetic REDRAW editor
MKRTADGSEFESPKKKRKVSKLEKFTNCYSLSKTLRFKAIPVGKTQENIDNKRLLVEDEKRAEDYKGVKKLLDRYYLSFINDVLHSIKLKNLNNYISLFRKKTRTEKENKELENLEINLRKEIAKAFKGNEGYKSLFKKDIIETILPEFLDDKDEIALVNSFNGFTTAFTGFFDNRENMFSEEAKSTSIAFRCINENLTRYISNMDIFEKVDAIFDKHEVQEIKEKILNSDYDVEDFFEGEFFNFVLTQEGIDVYNAIIGGFVTESGEKIKGLNEYINLYNQKTKQKLPKFKPLYKQVLSDRESLSFYGEGYTSDEEVLEVFRNTLNKNSEIFSSIKKLEKLFKNFDEYSSAGIFVKNGPAISTISKDIFGEWNVIRDKWNAEYDDIHLKKKAVVTEKYEDDRRKSFKKIGSFSLEQLQEYADADLSVVEKLKEIIIQKVDEIYKVYGSSEKLFDADFVLEKSLKKNDAVVAIMKDLLDSVKSFENYIKAFFGEGKETNRDESFYGDFVLAYDILLKVDHIYDAIRNYVTQKPYSKDKFKLYFQNPQFMGGWDKDKETDYRATILRYGSKYYLAIMDKKYAKCLQKIDKDDVNGNYEKINYKLLPGPNKMLPKVFFSKKWMAYYNPSEDIQKIYKNGTFKKGDMFNLNDCHKLIDFFKDSISRYPKWSNAYDFNFSETEKYKDIAGFYREVEEQGYKVSFESASKKEVDKLVEEGKLYMFQIYNKDFSDKSHGTPNLHTMYFKLLFDENNHGQIRLSGGAELFMRRASLKKEELVVAPANSPIANKNPDNPKKTTTLSYDVYKDKRFSEDQYELHIPIAINKCPKNIFKINTEVRVLLKHDDNPYVIGIDRGERNLLYIVVVDGKGNIVEQYSLNEIINNFNGIRIKTDYHSLLDKKEKERFEARQNWTSIENIKELKAGYISQVVHKICELVEKYDAVIALEDLNSGFKNSRVKVEKQVYQKFEKMLIDKLNYMVDKKSNPCATGGALKGYQITNKFESFKSMSTQNGFIFYIPAWLTSKIDPSTGFVNLLKTKYTSIADSKKFISSFDRIMYVPEEDLFEFALDYKNFSRTDADYIKKWKLYSYGNRIRIFRNPKKNNVFDWEEVCLTSAYKELFNKYGINYQQGDIRALLCEQSDKAFYSSFMALMSLMLQMANSITGRTDVDFLISPVKNSDGIFYDSRNYEAQENAILPKNADANGAYNIARKVLWAIGQFKKAEDEKLDKVKIAISNKEWLEYAQTSVKHSGSETPGTSESATPESTLNIEDEYRLHETSKEPDVSLGSTWLSDFPQAWAETGGMGLAVRQAPLIIPLKATSTPVSIKQYPMSQEARLGIKPHIQRLLDQGILVPCQSPWNTPLLPVKKPGTNDYRPVQDLREVNKRVEDIHPTVPNPYNLLSGLPPSHQWYTVLDLKDAFFCLRLHPTSQPLFAFEWRDPEMGISGQLTWTRLPQGFKNSPTLFNEALHRDLADFRIQHPDLILLQYVDDLLLAATSELDCQQGTRALLQTLGNLGYRASAKKAQICQKQVKYLGYLLKEGQRWLTEARKETVMGQPTPKTPRQLREFLGKAGFCRLFIPGFAEMAAPLYPLTKPGTLFNWGPDQQKAYQEIKQALLTAPALGLPDLTKPFELFVDEKQGYAKGVLTQKLGPWRRPVAYLSKKLDPVAAGWPPCLRMVAAIAVLTKDAGKLTMGQPLVILAPHAVEALVKQPPDRWLSNARMTHYQALLLDTDRVQFGPVVALNPATLLPLPEEGLQHNCLDILAEAHGTRPDLTDQPLPDADHTWYTDGSSLLQEGQRKAGAAVTTETEVIWAKALPAGTSAQRAELIALTQALKMAEGKKLNVYTDSRYAFATAHIHGEIYRRRGWLTSEGKEIKNKDEILALLKALFLPKRLSIIHCPGHQKGHSAEARGNRMADQAARKAAITETPDTSTLLIENSSPSGGSKRTADGSEFEPKKKRKVGSG

SEQ ID NO: 86 - protein, 1979 aa, Artificial
  Synthetic REDRAW editor
MKRTADGSEFESPKKKRKVSKLEKFTNCYSLSKTLRFKAIPVGKTQENIDNKRLLVEDEKRAEDYKGVKKLLDRYYLSFINDVLHSIKLKNLNNYISLFRKKTRTEKENKELENLEINLRKEIAKAFKGNEGYKSLFKKDIIETILPEFLDDKDEIALVNSFNGFTTAFTGFFDNRENMFSEEAKSTSIAFRCINENLTRYISNMDIFEKVDAIFDKHEVQEIKEKILNSDYDVEDFFEGEFFNFVLTQEGIDVYNAIIGGFVTESGEKIKGLNEYINLYNQKTKQKLPKFKPLYKQVLSDRESLSFYGEGYTSDEEVLEVFRNTLNKNSEIFSSIKKLEKLFKNFDEYSSAGIFVKNGPAISTISKDIFGEWNVIRDKWNAEYDDIHLKKKAVVTEKYEDDRRKSFKKIGSFSLEQLQEYADADLSVVEKLKEIIIQKVDEIYKVYGSSEKLFDADFVLEKSLKKNDAVVAIMKDLLDSVKSFENYIKAFFGEGKETNRDESFYGDFVLAYDILLKVDHIYDAIRNYVTQKPYSKDKFKLYFQNPQFMGGWDKDKETDYRATILRYGSKYYLAIMDKKYAKCLQKIDKDDVNGNYEKINYKLLPGPNKMLPKVFFSKKWMAYYNPSEDIQKIYKNGTFKKGDMFNLNDCHKLIDFFKDSISRYPKWSNAYDFNFSETEKYKDIAGFYREVEEQGYKVSFESASKKEVDKLVEEGKLYMFQIYNKDFSDKSHGTPNLHTMYFKLLFDENNHGQIRLSGGAELFMRRASLKKEELVVAPANSPIANKNPDNPKKTTTLSYDVYKDKRFSEDQYELHIPIAINKCPKNIFKINTEVRVLLKHDDNPYVIGIDRGERNLLYIVVVDGKGNIVEQYSLNEIINNFNGIRIKTDYHSLLDKKEKERFEARQNWTSIENIKELKAGYISQVVHKICELVEKYDAVIALEDLNSGFKNSRVKVEKQVYQKFEKMLIDKLNYMVDKKSNPCATGGALKGYQITNKFESFKSMSTQNGFIFYIPAWLTSKIDPSTGFVNLLKTKYTSIADSKKFISSFDRIMYVPEEDLFEFALDYKNFSRTDADYIKKWKLYSYGNRIRIFRNPKKNNVFDWEEVCLTSAYKELFNKYGINYQQGDIRALLCEQSDKAFYSSFMALMSLMLQMANSITGRTDVDFLISPVKNSDGIFYDSRNYEAQENAILPKNADANGAYNIARKVLWAIGQFKKAEDEKLDKVKIAISNKEWLEYAQTSVKHSGGSSGGSSGSETPGTSESATPESSGGSSGGSTLNIEDEYRLHETSKEPDVSLGSTWLSDFPQAWAETGGMGLAVRQAPLIIPLKATSTPVSIKQYPMSQEARLGIKPHIQRLLDQGILVPCQSPWNTPLLPVKKPGTNDYRPVQDLREVNKRVEDIHPTVPNPYNLLSGLPPSHQWYTVLDLKDAFFCLRLHPTSQPLFAFEWRDPEMGISGQLTWTRLPQGFKNSPTLFNEALHRDLADFRIQHPDLILLQYVDDLLLAATSELDCQQGTRALLQTLGNLGYRASAKKAQICQKQVKYLGYLLKEGQRWLTEARKETVMGQPTPKTPRQLREFLGKAGFCRLFIPGFAEMAAPLYPLTKPGTLFNWGPDQQKAYQEIKQALLTAPALGLPDLTKPFELFVDEKQGYAKGVLTQKLGPWRRPVAYLSKKLDPVAAGWPPCLRMVAAIAVLTKDAGKLTMGQPLVILAPHAVEALVKQPPDRWLSNARMTHYQALLLDTDRVQFGPVVALNPATLLPLPEEGLQHNCLDILAEAHGTRPDLTDQPLPDADHTWYTDGSSLLQEGQRKAGAAVTTETEVIWAKALPAGTSAQRAELIALTQALKMAEGKKLNVYTDSRYAFATAHIHGEIYRRRGWLTSEGKEIKNKDEILALLKALFLPKRLSIIHCPGHQKGHSAEARGNRMADQAARKAAITETPDTSTLLIENSSPSGGSKRTADGSEFEPKKKRKVGSG

SEQ ID NO: 87 - DNA, 166 bp, Artificial
  Synthetic tagRNA
gtttcaaagattaaataatttctactaagtgtagattacggctccgcagtggatggcggtaatttctactaagtgtagatgcggcgcgttgtttcatcaaggcgtacggtcaccgtaaccagcaaatcaatatcactgtgtggcttcaggccgccatccactgcgg

SEQ ID NO: 88 - DNA, 8019 bp, Artificial
  Synthetic plasmid
gacattgattattgactagttattaatagtaatcaattacggggtcattagttcatagcccatatatggagttccgcgttacataacttacggtaaatggcccgcctggctgaccgcccaacgacccccgcccattgacgtcaataatgacgtatgttcccatagtaacgccaatagggactttccattgacgtcaatgggtggagtatttacggtaaactgcccacttggcagtacatcaagtgtatcatatgccaagtacgccccctattgacgtcaatgacggtaaatggcccgcctggcattatgcccagtacatgaccttatgggactttcctacttggcagtacatctacgtattagtcatcgctattaccatggtgatgcggttttggcagtacatcaatgggcgtggatagcggtttgactcacggggatttccaagtctccaccccattgacgtcaatgggagtttgttttggcaccaaaatcaacgggactttccaaaatgtcgtaacaactccgccccattgacgcaaatgggcggtaggcgtgtacggtgggaggtctatataagcagagctggtttagtgaaccgtcagatccgctagagatccgcggccgctaatacgactcactatagggagagccgccaccatgaaacggacagccgacggaagcgagttcgagtcaccaaagaagaagcggaaagtctccaagctggagaagtttacaaactgttacagcctctccaaaaccctcaggtttaaagcgatcccggtgggcaagacccaggagaacatcgacaacaagaggctcctggtggaagacgagaagcgcgccgaagactacaagggcgtgaagaagctgctcgataggtactacctcagctttattaacgacgtgctgcacagcatcaaactcaagaatctcaacaactacatctccctcttccgcaaaaagacccgcaccgagaaggagaacaaggagctggagaacctggagatcaacctccgcaaggaaatcgccaaagcgttcaagggcaatgaagggtacaagagcctcttcaagaaagacatcatcgaaactatcctcccagagtttctcgatgacaaggacgagatcgcgctggtgaactcctttaacgggttcacaaccgcgtttaccggcttctttgataacagggaaaatatgttctccgaggaggccaagtccaccagcatcgccttcaggtgtatcaacgagaacctcacccgctacatttccaatatggacattttcgagaaggtggatgcgatcttcgataagcacgaggtgcaggagatcaaagagaagattctcaattccgattatgacgtcgaggatttcttcgaaggggagttctttaattttgtgctcacacaagagggcattgacgtgtacaacgcgattatcgggggcttcgtcacagagtccggggagaagattaaggggctgaatgagtacatcaatctgtacaatcagaagaccaagcagaaactgccgaaattcaagccgctctacaagcaagtcctgtccgatagggaaagcctctccttctacggcgagggctataccagcgacgaggaggtgctggaagtcttccgcaacacactgaataagaatagcgagattttctcctccatcaagaagctcgagaagctctttaagaactttgacgagtacagctccgccgggattttcgtgaagaacgggccggcgatcagcaccatctccaaggacatctttggcgagtggaacgtcatcagggacaagtggaacgccgagtacgacgacatccacctgaagaagaaggcggtggtgaccgagaagtatgaggacgatcgcaggaagtccttcaaaaaaatcggctccttcagcctcgaacagctccaggagtatgccgatgcggatctgtccgtcgtcgagaagctgaaggaaatcatcattcagaaggtcgacgagatctataaagtgtacgggtccagcgagaagctgttcgacgccgactttgtgctcgagaagtccctcaaaaagaatgacgccgtggtggccattatgaaagacctgctcgactccgtgaagtccttcgaaaattacattaaagcgttctttggggaggggaaggaaactaacagggatgagtccttctatggcgactttgtcctcgcgtacgacatcctgctgaaggtcgaccacatttacgacgcgatccgcaactacgtgacacagaagccgtactccaaagacaagttcaagctgtacttccagaacccgcaatttatggggggctgggacaaggataaagagacagactaccgcgcgacaattctccgctatggctccaaatactatctggccatcatggacaagaagtacgcgaagtgcctgcagaagatcgacaaagacgacgtcaatggcaactatgaaaagatcaactacaagctgctgccgggcccgaacaagatgctcccgaaggtgttcttcagcaagaagtggatggcctactacaatccaagcgaggatattcagaaaatctataaaaacgggaccttcaagaagggggacatgtttaacctcaacgactgccacaagctcattgatttcttcaaggatagcatttcccgctacccgaaatggtccaatgcgtacgattttaacttctccgagacagaaaagtacaaagacatcgcgggcttttacagggaggtggaggagcaagggtataaagtttcttttgaatccgcgagcaagaaggaagtcgacaagctcgtcgaggagggcaagctctacatgttccaaatttataacaaggacttttccgacaagagccatgggaccccaaacctccacaccatgtacttcaaactgctctttgacgagaacaaccacgggcaaatcaggctgagcggcggcgccgaattattcatgcgcagggcctccctcaagaaggaagagctggtcgtccatccagccaattccccgatcgcgaacaagaacccggacaatccgaaaaagaccaccaccctgtcctacgacgtctacaaggacaaacgcttcagcgaagaccagtacgaattacacatcccaattgcgattaataagtgcccaaagaatatcttcaaaattaatacagaggtcagggtgctgctcaaacacgacgacaatccgtatgtcatcggcattgacaggggcgagcgcaatctgctctatatcgtggtcgtggatgggaagggcaatattgtggagcagtactccctgaacgagattatcaacaacttcaatgggattaggattaagaccgactatcacagcctgctcgacaagaaagaaaaagagaggtttgaggcccgccaaaactggacctccattgagaatatcaaagaattaaaggccggctatatttcccaagtcgtccacaagatctgcgagctggtggagaaatatgacgccgtgattgcgctcgaagacttaaattctgggttcaagaactcccgcgtgaaggtggaaaaacaggtgtatcagaaattcgagaaaatgctgatcgacaaactcaattatatggtggataagaagtccaacccgtgtgccacagggggcgcgctgaagggctatcagatcaccaacaagttcgagagcttcaagagcatgagcacccagaacgggtttattttctacatcccggcgtggctcacctccaagattgacccgagcaccggcttcgtgaacctcctgaagacaaagtatacctccattgccgacagcaagaagtttatctcctccttcgaccgcattatgtatgtgccggaggaggacctcttcgagttcgccctcgactacaaaaacttcagccgcacagatgcggattacatcaagaagtggaagctgtactcctacgggaacaggatccgcatcttcaggaatccaaaaaaaaataacgtctttgactgggaggaagtgtgcctgacatccgcctacaaggaactgttcaataaatacggcatcaattaccagcagggcgacattcgcgccctcctctgtgagcagtccgacaaagcgttttactccagcttcatggccctcatgtccctgatgctccaaatgaggaatagcatcacagggcgcaccgacgtcgacttcctcatcagcccggtgaagaactccgacgggatcttttacgactcccgcaactatgaggcgcaagagaatgcgatcctcccgaagaacgccgatgcgaacggggcctataatatcgccaggaaagtgctctgggccatcgggcagttcaaaaaggcggaggatgagaagctcgacaaggtgaaaattgccatttccaacaaggagtggctggagtacgcgcagacctccgtgaagcactctggcggctcaaaaagaaccgccgacggcagcgaattcgagcccaagaagaagaggaaagtcggaagcggagctactaacttcagcctgctgaagcaggctggagacgtggaggagaaccctggacctatggtgagcaagggcgaggagctgttcaccggggtggtgcccatcctggtcgagctggacggcgacgtaaacggccacaagttcagcgtgtccggcgagggcgagggcgatgccacctacggcaagctgaccctgaagttcatctgcaccaccggcaagctgcccgtgccctggcccaccctcgtgaccaccctgacctatggagtgcagtgcttcagccgctaccccgaccacatgaagcagcacgacttcttcaagtccgccatgcccgaaggctacgtccaggagcgcaccatcttcttcaaggacgacggcaactacaagacccgcgccgaggtgaagttcgagggcgacaccctggtgaaccgcatcgagctgaagggcatcgacttcaaggaggacggcaacatcctggggcacaagctggagtacaactacaacagccacaacgtctatatcatggccgacaagcagaagaacggcatcaaggtgaacttcaagatccgccacaacatcgaggacggcagcgtgcagctcgccgaccactaccagcagaacacccccatcggcgacggccccgtgctgctgcccgacaaccactacctgagcacccagtccgccctgagcaaagaccccaacgagaagcgcgatcacatggtcctgctggagttcgtgaccgccgccgggatcactctcggcatggacgagctgtacaagtctggtggttctcccaagaagaagaggaaagtctaaccggtcatcatcaccatcaccattgagtttaaacccgctgatcagcctcgactgtgccttctagttgccagccatctgttgtttgcccctcccccgtgccttccttgaccctggaaggtgccactcccactgtcctttcctaataaaatgaggaaattgcatcgcattgtctgagtaggtgtcattctattctggggggtggggtggggcaggacagcaagggggaggattgggaagacaatagcaggcatgctggggatgcggtgggctctatggcttctgaggcggaaagaaccagctggggctcgataccgtcgacctctagctagagcttggcgtaatcatggtcatagctgtttcctgtgtgaaattgttatccgctcacaattccacacaacatacgagccggaagcataaagtgtaaagcctagggtgcctaatgagtgagctaactcacattaattgcgttgcgctcactgcccgctttccagtcgggaaacctgtcgtgccagctgcattaatgaatcggccaacgcgcggggagaggcggtttgcgtattgggcgctcttccgcttcctcgctcactgactcgctgcgctcggtcgttcggctgcggcgagcggtatcagctcactcaaaggcggtaatacggttatccacagaatcaggggataacgcaggaaagaacatgtgagcaaaaggccagcaaaaggccaggaaccgtaaaaaggccgcgttgctggcgtttttccataggctccgcccccctgacgagcatcacaaaaatcgacgctcaagtcagaggtggcgaaacccgacaggactataaagataccaggcgtttccccctggaagctccctcgtgcgctctcctgttccgaccctgccgcttaccggatacctgtccgcctttctcccttcgggaagcgtggcgctttctcatagctcacgctgtaggtatctcagttcggtgtaggtcgttcgctccaagctgggctgtgtgcacgaaccccccgttcagcccgaccgctgcgccttatccggtaactatcgtcttgagtccaacccggtaagacacgacttatcgccactggcagcagccactggtaacaggattagcagagcgaggtatgtaggcggtgctacagagttcttgaagtggtggcctaactacggctacactagaagaacagtatttggtatctgcgctctgctgaagccagttaccttcggaaaaagagttggtagctcttgatccggcaaacaaaccaccgctggtagcggtggtttttttgtttgcaagcagcagattacgcgcagaaaaaaaggatctcaagaagatcctttgatcttttctacggggtctgacactcagtggaacgaaaactcacgttaagggattttggtcatgagattatcaaaaaggatcttcacctagatccttttaaattaaaaatgaagttttaaatcaatctaaagtatatatgagtaaacttggtctgacagttaccaatgcttaatcagtgaggcacctatctcagcgatctgtctatttcgttcatccatagttgcctgactccccgtcgtgtagataactacgatacgggagggcttaccatctggccccagtgctgcaatgataccgcgagacccacgctcaccggctccagatttatcagcaataaaccagccagccggaagggccgagcgcagaagtggtcctgcaactttatccgcctccatccagtctattaattgttgccgggaagctagagtaagtagttcgccagttaatagtttgcgcaacgttgttgccattgctacaggcatcgtggtgtcacgctcgtcgtttggtatggcttcattcagctccggttcccaacgatcaaggcgagttacatgatcccccatgttgtgcaaaaaagcggttagctccttcggtcctccgatcgttgtcagaagtaagttggccgcagtgttatcactcatggttatggcagcactgcataattctcttactgtcatgccatccgtaagatgcttttctgtgactggtgagtactcaaccaagtcattctgagaatagtgtatgcggcgaccgagttgctcttgcccggcgtcaatacgggataataccgcgccacatagcagaactttaaaagtgctcatcattggaaaacgttcttcggggcgaaaactctcaaggatcttaccgctgttgagatccagttcgatgtaacccactcgtgcacccaactgatcttcagcatcttttactttcaccagcgtttctgggtgagcaaaaacaggaaggcaaaatgccgcaaaaaagggaataagggcgacacggaaatgttgaatactcatactcttcctttttcaatattattgaagcatttatcagggttattgtctcatgagcggatacatatttgaatgtatttagaaaaataaacaaataggggttccgcgcacatttccccgaaaagtgccacctgacgtcgacggatcgggagatcgatctcccgatcccctagggtcgactctcagtacaatctgctctgatgccgcatagttaagccagtatctgctccctgcttgtgtgttggaggtcgctgagtagtgcgcgagcaaaatttaagctacaacaaggcaaggcttgaccgacaattgcatgaagaatctgcttagggttaggcgttttgcgctgcttcgcgatgtacgggccagatatacgcgtt

SEQ ID NO: 89 - DNA, 10116 bp, Artificial
  Synthetic REDRAW editor
gacattgattattgactagttattaatagtaatcaattacggggtcattagttcatagcccatatatggagttccgcgttacataacttacggtaaatggcccgcctggctgaccgcccaacgacccccgcccattgacgtcaataatgacgtatgttcccatagtaacgccaatagggactttccattgacgtcaatgggtggagtatttacggtaaactgcccacttggcagtacatcaagtgtatcatatgccaagtacgccccctattgacgtcaatgacggtaaatggcccgcctggcattatgcccagtacatgaccttatgggactttcctacttggcagtacatctacgtattagtcatcgctattaccatggtgatgcggttttggcagtacatcaatgggcgtggatagcggtttgactcacggggatttccaagtctccaccccattgacgtcaatgggagtttgttttggcaccaaaatcaacgggactttccaaaatgtcgtaacaactccgccccattgacgcaaatgggcggtaggcgtgtacggtgggaggtctatataagcagagctggtttagtgaaccgtcagatccgctagagatccgcggccgctaatacgactcactatagggagagccgccaccatgaaacggacagccgacggaagcgagttcgagtcaccaaagaagaagcggaaagtcacacttaatattgaggatgaacatagattgcacgagacctctaaggaacctgatgtttctcttggatcaacttggttgtcagatttcccacaagcatgggcagagaccggaggtatgggtcttgctgttaggcaggcaccacttattattcctttgaaggcaacctctactcctgtgtcaattaagcaatatccaatgtctcaggaagctaggcttggaattaagcctcacattcaaagacttttggatcagggtattttggtgccatgtcaatcaccttggaacacaccacttttgcctgttaagaagcctggaactaatgattacagaccagtgcaagatttgagggaggttaacaagagagtggaagatattcacccaactgttccaaacccttataatcttttgtctggattgccaccttcacatcaatggtacactgtgcttgatttgaaggatgcatttttctgccttaggttgcatccaacatctcagcctctttttgctttcgagtggagagatcctgaaatgggaatttctggtcaacttacatggaccaggttgcctcagggtttcaagaactcaccaaccttgtttaatgaggcacttcacagggatttggctgattttaggattcaacatcctgatcttatccttttgcagtatgttgatgatcttttgcttgctgcaacttctgaattggattgtcaacagggaactagggcattgcttcaaacacttggaaatttgggttacagagcttcagcaaagaaggctcagatttgccaaaagcaggttaagtatcttggatacttgcttaaggaaggacaaaggtggttgaccgaggctagaaaggaaactgtgatgggtcaaccaacacctaagacccctaggcagcttagagagttcttgggaaaggcaggtttttgtaggcttttcattccaggatttgctgaaatggctgcaccactttatcctttgaccaagcctggaactttgtttaactggggtccagatcaacagaaggcataccaagaaattaagcaggctttgcttactgctccagcacttggtttgcctgatcttacaaagccatttgagttgttcgttgatgaaaagcaaggatatgcaaagggtgtgcttacccagaagttgggaccttggagaaggcctgttgcttacctttctaagaaacttgatccagtggctgcaggttggccaccttgtcttagaatggttgctgcaattgcagtgcttacaaaggatgctggaaagttgactatgggacaacctcttgttattttggcaccacacgctgttgaggcacttgtgaagcagccacctgataggtggttgtcaaacgcaagaatgacccattatcaagctcttcttttggatactgatagggtgcagttcggtcctgttgtggctttgaatccagcaacacttttgccacttcctgaggaaggattgcaacacaactgccttgatattttggctgaggcacatggtacaagacctgatcttaccgatcagccattgcctgatgctgatcacacttggtacacagatggatcttcacttttgcaagaaggacagaggaaggctggtgctgcagttactacagagactgaagtgatttgggctaaggcacttccagctggaacatctgctcaaagagcagagcttattgctttgacccaggcacttaagatggctgaaggaaagaagttgaacgtttacactgattctaggtatgctttcgcaacagctcatattcacggagaaatctatagaaggagaggatggttgacatcagagggaaaggaaattaagaacaaggatgaaattcttgcacttttgaaggctctttttcttcctaagagattgtctattattcattgcccaggacaccaaaagggtcattcagcagaagctaggggaaatagaatggctgatcaggctgcaagaaaggctgcaattactgagacacctgatacctctactcttttgatcgaaaactcttcaccaaattcaaggcttattaactctggcagcgaaactccgggcacttccgagtcagctactcctgagtcttccaagctggagaagtttacaaactgttacagcctctccaaaaccctcaggtttaaagcgatcccggtgggcaagacccaggagaacatcgacaacaagaggctcctggtggaagacgagaagcgcgccgaagactacaagggcgtgaagaagctgctcgataggtactacctcagctttattaacgacgtgctgcacagcatcaaactcaagaatctcaacaactacatctccctcttccgcaaaaagacccgcaccgagaaggagaacaaggagctggagaacctggagatcaacctccgcaaggaaatcgccaaagcgttcaagggcaatgaagggtacaagagcctcttcaagaaagacatcatcgaaactatcctcccagagtttctcgatgacaaggacgagatcgcgctggtgaactcctttaacgggttcacaaccgcgtttaccggcttctttgataacagggaaaatatgttctccgaggaggccaagtccaccagcatcgccttcaggtgtatcaacgagaacctcacccgctacatttccaatatggacattttcgagaaggtggatgcgatcttcgataagcacgaggtgcaggagatcaaagagaagattctcaattccgattatgacgtcgaggatttcttcgaaggggagttctttaattttgtgctcacacaagagggcattgacgtgtacaacgcgattatcgggggcttcgtcacagagtccggggagaagattaaggggctgaatgagtacatcaatctgtacaatcagaagaccaagcagaaactgccgaaattcaagccgctctacaagcaagtcctgtccgatagggaaagcctctccttctacggcgagggctataccagcgacgaggaggtgctggaagtcttccgcaacacactgaataagaatagcgagattttctcctccatcaagaagctcgagaagctctttaagaactttgacgagtacagctccgccgggattttcgtgaagaacgggccggcgatcagcaccatctccaaggacatctttggcgagtggaacgtcatcagggacaagtggaacgccgagtacgacgacatccacctgaagaagaaggcggtggtgaccgagaagtatgaggacgatcgcaggaagtccttcaaaaaaatcggctccttcagcctcgaacagctccaggagtatgccgatgcggatctgtccgtcgtcgagaagctgaaggaaatcatcattcagaaggtcgacgagatctataaagtgtacgggtccagcgagaagctgttcgacgccgactttgtgctcgagaagtccctcaaaaagaatgacgccgtggtggccattatgaaagacctgctcgactccgtgaagtccttcgaaaattacattaaagcgttctttggggaggggaaggaaactaacagggatgagtccttctatggcgactttgtcctcgcgtacgacatcctgctgaaggtcgaccacatttacgacgcgatccgcaactacgtgacacagaagccgtactccaaagacaagttcaagctgtacttccagaacccgcaatttatggggggctgggacaaggataaagagacagactaccgcgcgacaattctccgctatggctccaaatactatctggccatcatggacaagaagtacgcgaagtgcctgcagaagatcgacaaagacgacgtcaatggcaactatgaaaagatcaactacaagctgctgccgggcccgaacaagatgctcccgaaggtgttcttcagcaagaagtggatggcctactacaatccaagcgaggatattcagaaaatctataaaaacgggaccttcaagaagggggacatgtttaacctcaacgactgccacaagctcattgatttcttcaaggatagcatttcccgctacccgaaatggtccaatgcgtacgattttaacttctccgagacagaaaagtacaaagacatcgcgggcttttacagggaggtggaggagcaagggtataaagtttcttttgaatccgcgagcaagaaggaagtcgacaagctcgtcgaggagggcaagctctacatgttccaaatttataacaaggacttttccgacaagagccatgggaccccaaacctccacaccatgtacttcaaactgctctttgacgagaacaaccacgggcaaatcaggctgagcggcggcgccgaattattcatgcgcagggcctccctcaagaaggaagagctggtcgtccatccagccaattccccgatcgcgaacaagaacccggacaatccgaaaaagaccaccaccctgtcctacgacgtctacaaggacaaacgcttcagcgaagaccagtacgaattacacatcccaattgcgattaataagtgcccaaagaatatcttcaaaattaatacagaggtcagggtgctgctcaaacacgacgacaatccgtatgtcatcggcattgacaggggcgagcgcaatctgctctatatcgtggtcgtggatgggaagggcaatattgtggagcagtactccctgaacgagattatcaacaacttcaatgggattaggattaagaccgactatcacagcctgctcgacaagaaagaaaaagagaggtttgaggcccgccaaaactggacctccattgagaatatcaaagaattaaaggccggctatatttcccaagtcgtccacaagatctgcgagctggtggagaaatatgacgccgtgattgcgctcgaagacttaaattctgggttcaagaactcccgcgtgaaggtggaaaaacaggtgtatcagaaattcgagaaaatgctgatcgacaaactcaattatatggtggataagaagtccaacccgtgtgccacagggggcgcgctgaagggctatcagatcaccaacaagttcgagagcttcaagagcatgagcacccagaacgggtttattttctacatcccggcgtggctcacctccaagattgacccgagcaccggcttcgtgaacctcctgaagacaaagtatacctccattgccgacagcaagaagtttatctcctccttcgaccgcattatgtatgtgccggaggaggacctcttcgagttcgccctcgactacaaaaacttcagccgcacagatgcggattacatcaagaagtggaagctgtactcctacgggaacaggatccgcatcttcaggaatccaaaaaaaaataacgtctttgactgggaggaagtgtgcctgacatccgcctacaaggaactgttcaataaatacggcatcaattaccagcagggcgacattcgcgccctcctctgtgagcagtccgacaaagcgttttactccagcttcatggccctcatgtccctgatgctccaaatggcgaatagcatcacagggcgcaccgacgtcgacttcctcatcagcccggtgaagaactccgacgggatcttttacgactcccgcaactatgaggcgcaagagaatgcgatcctcccgaagaacgccgatgcgaacggggcctataatatcgccaggaaagtgctctgggccatcgggcagttcaaaaaggcggaggatgagaagctcgacaaggtgaaaattgccatttccaacaaggagtggctggagtacgcgcagacctccgtgaagcactctggcggctcaaaaagaaccgccgacggcagcgaattcgagcccaagaagaagaggaaagtcggaagcggagctactaacttcagcctgctgaagcaggctggagacgtggaggagaaccctggacctatggtgagcaagggcgaggagctgttcaccggggtggtgcccatcctggtcgagctggacggcgacgtaaacggccacaagttcagcgtgtccggcgagggcgagggcgatgccacctacggcaagctgaccctgaagttcatctgcaccaccggcaagctgcccgtgccctggcccaccctcgtgaccaccctgacctatggagtgcagtgcttcagccgctaccccgaccacatgaagcagcacgacttcttcaagtccgccatgcccgaaggctacgtccaggagcgcaccatcttcttcaaggacgacggcaactacaagacccgcgccgaggtgaagttcgagggcgacaccctggtgaaccgcatcgagctgaagggcatcgacttcaaggaggacggcaacatcctggggcacaagctggagtacaactacaacagccacaacgtctatatcatggccgacaagcagaagaacggcatcaaggtgaacttcaagatccgccacaacatcgaggacggcagcgtgcagctcgccgaccactaccagcagaacacccccatcggcgacggccccgtgctgctgcccgacaaccactacctgagcacccagtccgccctgagcaaagaccccaacgagaagcgcgatcacatggtcctgctggagttcgtgaccgccgccgggatcactctcggcatggacgagctgtacaagtctggtggttctcccaagaagaagaggaaagtctaaccggtcatcatcaccatcaccattgagtttaaacccgctgatcagcctcgactgtgccttctagttgccagccatctgttgtttgcccctcccccgtgccttccttgaccctggaaggtgccactcccactgtcctttcctaataaaatgaggaaattgcatcgcattgtctgagtaggtgtcattctattctggggggtggggtggggcaggacagcaagggggaggattgggaagacaatagcaggcatgctggggatgcggtgggctctatggcttctgaggcggaaagaaccagctggggctcgataccgtcgacctctagctagagcttggcgtaatcatggtcatagctgtttcctgtgtgaaattgttatccgctcacaattccacacaacatacgagccggaagcataaagtgtaaagcctagggtgcctaatgagtgagctaactcacattaattgcgttgcgctcactgcccgctttccagtcgggaaacctgtcgtgccagctgcattaatgaatcggccaacgcgcggggagaggcggtttgcgtattgggcgctcttccgcttcctcgctcactgactcgctgcgctcggtcgttcggctgcggcgagcggtatcagctcactcaaaggcggtaatacggttatccacagaatcaggggataacgcaggaaagaacatgtgagcaaaaggccagcaaaaggccaggaaccgtaaaaaggccgcgttgctggcgtttttccataggctccgcccccctgacgagcatcacaaaaatcgacgctcaagtcagaggtggcgaaacccgacaggactataaagataccaggcgtttccccctggaagctccctcgtgcgctctcctgttccgaccctgccgcttaccggatacctgtccgcctttctcccttcgggaagcgtggcgctttctcatagctcacgctgtaggtatctcagttcggtgtaggtcgttcgctccaagctgggctgtgtgcacgaaccccccgttcagcccgaccgctgcgccttatccggtaactatcgtcttgagtccaacccggtaagacacgacttatcgccactggcagcagccactggtaacaggattagcagagcgaggtatgtaggcggtgctacagagttcttgaagtggtggcctaactacggctacactagaagaacagtatttggtatctgcgctctgctgaagccagttaccttcggaaaaagagttggtagctcttgatccggcaaacaaaccaccgctggtagcggtggtttttttgtttgcaagcagcagattacgcgcagaaaaaaaggatctcaagaagatcctttgatcttttctacggggtctgacactcagtggaacgaaaactcacgttaagggattttggtcatgagattatcaaaaaggatcttcacctagatccttttaaattaaaaatgaagttttaaatcaatctaaagtatatatgagtaaacttggtctgacagttaccaatgcttaatcagtgaggcacctatctcagcgatctgtctatttcgttcatccatagttgcctgactccccgtcgtgtagataactacgatacgggagggcttaccatctggccccagtgctgcaatgataccgcgagacccacgctcaccggctccagatttatcagcaataaaccagccagccggaagggccgagcgcagaagtggtcctgcaactttatccgcctccatccagtctattaattgttgccgggaagctagagtaagtagttcgccagttaatagtttgcgcaacgttgttgccattgctacaggcatcgtggtgtcacgctcgtcgtttggtatggcttcattcagctccggttcccaacgatcaaggcgagttacatgatcccccatgttgtgcaaaaaagcggttagctccttcggtcctccgatcgttgtcagaagtaagttggccgcagtgttatcactcatggttatggcagcactgcataattctcttactgtcatgccatccgtaagatgcttttctgtgactggtgagtactcaaccaagtcattctgagaatagtgtatgcggcgaccgagttgctcttgcccggcgtcaatacgggataataccgcgccacatagcagaactttaaaagtgctcatcattggaaaacgttcttcggggcgaaaactctcaaggatcttaccgctgttgagatccagttcgatgtaacccactcgtgcacccaactgatcttcagcatcttttactttcaccagcgtttctgggtgagcaaaaacaggaaggcaaaatgccgcaaaaaagggaataagggcgacacggaaatgttgaatactcatactcttcctttttcaatattattgaagcatttatcagggttattgtctcatgagcggatacatatttgaatgtatttagaaaaataaacaaataggggttccgcgcacatttccccgaaaagtgccacctgacgtcgacggatcgggagatcgatctcccgatcccctagggtcgactctcagtacaatctgctctgatgccgcatagttaagccagtatctgctccctgcttgtgtgttggaggtcgctgagtagtgcgcgagcaaaatttaagctacaacaaggcaaggcttgaccgacaattgcatgaagaatctgcttagggttaggcgttttgcgctgcttcgcgatgtacgggccagatatacgcgtt

SEQ ID NO: 90 - DNA, 6717 bp, Artificial
  Synthetic tagRNA
atgaaacggacagccgacggaagcgagttcgagtcaccaaagaagaagcggaaagtcacacttaatattgaggatgaacatagattgcacgagacctctaaggaacctgatgtttctcttggatcaacttggttgtcagatttcccacaagcatgggcagagaccggaggtatgggtcttgctgttaggcaggcaccacttattattcctttgaaggcaacctctactcctgtgtcaattaagcaatatccaatgtctcaggaagctaggcttggaattaagcctcacattcaaagacttttggatcagggtattttggtgccatgtcaatcaccttggaacacaccacttttgcctgttaagaagcctggaactaatgattacagaccagtgcaagatttgagggaggttaacaagagagtggaagatattcacccaactgttccaaacccttataatcttttgtctggattgccaccttcacatcaatggtacactgtgcttgatttgaaggatgcatttttctgccttaggttgcatccaacatctcagcctctttttgctttcgagtggagagatcctgaaatgggaatttctggtcaacttacatggaccaggttgcctcagggtttcaagaactcaccaaccttgtttaatgaggcacttcacagggatttggctgattttaggattcaacatcctgatcttatccttttgcagtatgttgatgatcttttgcttgctgcaacttctgaattggattgtcaacagggaactagggcattgcttcaaacacttggaaatttgggttacagagcttcagcaaagaaggctcagatttgccaaaagcaggttaagtatcttggatacttgcttaaggaaggacaaaggtggttgaccgaggctagaaaggaaactgtgatgggtcaaccaacacctaagacccctaggcagcttagagagttcttgggaaaggcaggtttttgtaggcttttcattccaggatttgctgaaatggctgcaccactttatcctttgaccaagcctggaactttgtttaactggggtccagatcaacagaaggcataccaagaaattaagcaggctttgcttactgctccagcacttggtttgcctgatcttacaaagccatttgagttgttcgttgatgaaaagcaaggatatgcaaagggtgtgcttacccagaagttgggaccttggagaaggcctgttgcttacctttctaagaaacttgatccagtggctgcaggttggccaccttgtcttagaatggttgctgcaattgcagtgcttacaaaggatgctggaaagttgactatgggacaacctcttgttattttggcaccacacgctgttgaggcacttgtgaagcagccacctgataggtggttgtcaaacgcaagaatgacccattatcaagctcttcttttggatactgatagggtgcagttcggtcctgttgtggctttgaatccagcaacacttttgccacttcctgaggaaggattgcaacacaactgccttgatattttggctgaggcacatggtacaagacctgatcttaccgatcagccattgcctgatgctgatcacacttggtacacagatggatcttcacttttgcaagaaggacagaggaaggctggtgctgcagttactacagagactgaagtgatttgggctaaggcacttccagctggaacatctgctcaaagagcagagcttattgctttgacccaggcacttaagatggctgaaggaaagaagttgaacgtttacactgattctaggtatgctttcgcaacagctcatattcacggagaaatctatagaaggagaggatggttgacatcagagggaaaggaaattaagaacaaggatgaaattcttgcacttttgaaggctctttttcttcctaagagattgtctattattcattgcccaggacaccaaaagggtcattcagcagaagctaggggaaatagaatggctgatcaggctgcaagaaaggctgcaattactgagacacctgatacctctactcttttgatcgaaaactcttcaccaaattcaaggcttattaactctggcagcgaaactccgggcacttccgagtcagctactcctgagtcttccaagctggagaagtttacaaactgttacagcctctccaaaaccctcaggtttaaagcgatcccggtgggcaagacccaggagaacatcgacaacaagaggctcctggtggaagacgagaagcgcgccgaagactacaagggcgtgaagaagctgctcgataggtactacctcagctttattaacgacgtgctgcacagcatcaaactcaagaatctcaacaactacatctccctcttccgcaaaaagacccgcaccgagaaggagaacaaggagctggagaacctggagatcaacctccgcaaggaaatcgccaaagcgttcaagggcaatgaagggtacaagagcctcttcaagaaagacatcatcgaaactatcctcccagagtttctcgatgacaaggacgagatcgcgctggtgaactcctttaacgggttcacaaccgcgtttaccggcttctttgataacagggaaaatatgttctccgaggaggccaagtccaccagcatcgccttcaggtgtatcaacgagaacctcacccgctacatttccaatatggacattttcgagaaggtggatgcgatcttcgataagcacgaggtgcaggagatcaaagagaagattctcaattccgattatgacgtcgaggatttcttcgaaggggagttctttaattttgtgctcacacaagagggcattgacgtgtacaacgcgattatcgggggcttcgtcacagagtccggggagaagattaaggggctgaatgagtacatcaatctgtacaatcagaagaccaagcagaaactgccgaaattcaagccgctctacaagcaagtcctgtccgatagggaaagcctctccttctacggcgagggctataccagcgacgaggaggtgctggaagtcttccgcaacacactgaataagaatagcgagattttctcctccatcaagaagctcgagaagctctttaagaactttgacgagtacagctccgccgggattttcgtgaagaacgggccggcgatcagcaccatctccaaggacatctttggcgagtggaacgtcatcagggacaagtggaacgccgagtacgacgacatccacctgaagaagaaggcggtggtgaccgagaagtatgaggacgatcgcaggaagtccttcaaaaaaatcggctccttcagcctcgaacagctccaggagtatgccgatgcggatctgtccgtcgtcgagaagctgaaggaaatcatcattcagaaggtcgacgagatctataaagtgtacgggtccagcgagaagctgttcgacgccgactttgtgctcgagaagtccctcaaaaagaatgacgccgtggtggccattatgaaagacctgctcgactccgtgaagtccttcgaaaattacattaaagcgttctttggggaggggaaggaaactaacagggatgagtccttctatggcgactttgtcctcgcgtacgacatcctgctgaaggtcgaccacatttacgacgcgatccgcaactacgtgacacagaagccgtactccaaagacaagttcaagctgtacttccagaacccgcaatttatggggggctgggacaaggataaagagacagactaccgcgcgacaattctccgctatggctccaaatactatctggccatcatggacaagaagtacgcgaagtgcctgcagaagatcgacaaagacgacgtcaatggcaactatgaaaagatcaactacaagctgctgccgggcccgaacaagatgctcccgaaggtgttcttcagcaagaagtggatggcctactacaatccaagcgaggatattcagaaaatctataaaaacgggaccttcaagaagggggacatgtttaacctcaacgactgccacaagctcattgatttcttcaaggatagcatttcccgctacccgaaatggtccaatgcgtacgattttaacttctccgagacagaaaagtacaaagacatcgcgggcttttacagggaggtggaggagcaagggtataaagtttcttttgaatccgcgagcaagaaggaagtcgacaagctcgtcgaggagggcaagctctacatgttccaaatttataacaaggacttttccgacaagagccatgggaccccaaacctccacaccatgtacttcaaactgctctttgacgagaacaaccacgggcaaatcaggctgagcggcggcgccgaattattcatgcgcagggcctccctcaagaaggaagagctggtcgtccatccagccaattccccgatcgcgaacaagaacccggacaatccgaaaaagaccaccaccctgtcctacgacgtctacaaggacaaacgcttcagcgaagaccagtacgaattacacatcccaattgcgattaataagtgcccaaagaatatcttcaaaattaatacagaggtcagggtgctgctcaaacacgacgacaatccgtatgtcatcggcattgacaggggcgagcgcaatctgctctatatcgtggtcgtggatgggaagggcaatattgtggagcagtactccctgaacgagattatcaacaacttcaatgggattaggattaagaccgactatcacagcctgctcgacaagaaagaaaaagagaggtttgaggcccgccaaaactggacctccattgagaatatcaaagaattaaaggccggctatatttcccaagtcgtccacaagatctgcgagctggtggagaaatatgacgccgtgattgcgctcgaagacttaaattctgggttcaagaactcccgcgtgaaggtggaaaaacaggtgtatcagaaattcgagaaaatgctgatcgacaaactcaattatatggtggataagaagtccaacccgtgtgccacagggggcgcgctgaagggctatcagatcaccaacaagttcgagagcttcaagagcatgagcacccagaacgggtttattttctacatcccggcgtggctcacctccaagattgacccgagcaccggcttcgtgaacctcctgaagacaaagtatacctccattgccgacagcaagaagtttatctcctccttcgaccgcattatgtatgtgccggaggaggacctcttcgagttcgccctcgactacaaaaacttcagccgcacagatgcggattacatcaagaagtggaagctgtactcctacgggaacaggatccgcatcttcaggaatccaaaaaaaaataacgtctttgactgggaggaagtgtgcctgacatccgcctacaaggaactgttcaataaatacggcatcaattaccagcagggcgacattcgcgccctcctctgtgagcagtccgacaaagcgttttactccagcttcatggccctcatgtccctgatgctccaaatggcgaatagcatcacagggcgcaccgacgtcgacttcctcatcagcccggtgaagaactccgacgggatcttttacgactcccgcaactatgaggcgcaagagaatgcgatcctcccgaagaacgccgatgcgaacggggcctataatatcgccaggaaagtgctctgggccatcgggcagttcaaaaaggcggaggatgagaagctcgacaaggtgaaaattgccatttccaacaaggagtggctggagtacgcgcagacctccgtgaagcactctggcggctcaaaaagaaccgccgacggcagcgaattcgagcccaagaagaagaggaaagtcggaagcggagctactaacttcagcctgctgaagcaggctggagacgtggaggagaaccctggacctatggtgagcaagggcgaggagctgttcaccggggtggtgcccatcctggtcgagctggacggcgacgtaaacggccacaagttcagcgtgtccggcgagggcgagggcgatgccacctacggcaagctgaccctgaagttcatctgcaccaccggcaagctgcccgtgccctggcccaccctcgtgaccaccctgacctatggagtgcagtgcttcagccgctaccccgaccacatgaagcagcacgacttcttcaagtccgccatgcccgaaggctacgtccaggagcgcaccatcttcttcaaggacgacggcaactacaagacccgcgccgaggtgaagttcgagggcgacaccctggtgaaccgcatcgagctgaagggcatcgacttcaaggaggacggcaacatcctggggcacaagctggagtacaactacaacagccacaacgtctatatcatggccgacaagcagaagaacggcatcaaggtgaacttcaagatccgccacaacatcgaggacggcagcgtgcagctcgccgaccactaccagcagaacacccccatcggcgacggccccgtgctgctgcccgacaaccactacctgagcacccagtccgccctgagcaaagaccccaacgagaagcgcgatcacatggtcctgctggagttcgtgaccgccgccgggatcactctcggcatggacgagctgtacaagtctggtggttctcccaagaagaagaggaaagtctaa

SEQ ID NO: 91 - protein, 2238 aa, Artificial
  Synthetic editor sequence
MKRTADGSEFESPKKKRKVTLNIEDEHRLHETSKEPDVSLGSTWLSDFPQAWAETGGMGLAVRQAPLIIPLKATSTPVSIKQYPMSQEARLGIKPHIQRLLDQGILVPCQSPWNTPLLPVKKPGTNDYRPVQDLREVNKRVEDIHPTVPNPYNLLSGLPPSHQWYTVLDLKDAFFCLRLHPTSQPLFAFEWRDPEMGISGQLTWTRLPQGFKNSPTLFNEALHRDLADFRIQHPDLILLQYVDDLLLAATSELDCQQGTRALLQTLGNLGYRASAKKAQICQKQVKYLGYLLKEGQRWLTEARKETVMGQPTPKTPRQLREFLGKAGFCRLFIPGFAEMAAPLYPLTKPGTLFNWGPDQQKAYQEIKQALLTAPALGLPDLTKPFELFVDEKQGYAKGVLTQKLGPWRRPVAYLSKKLDPVAAGWPPCLRMVAAIAVLTKDAGKLTMGQPLVILAPHAVEALVKQPPDRWLSNARMTHYQALLLDTDRVQFGPVVALNPATLLPLPEEGLQHNCLDILAEAHGTRPDLTDQPLPDADHTWYTDGSSLLQEGQRKAGAAVTTETEVIWAKALPAGTSAQRAELIALTQALKMAEGKKLNVYTDSRYAFATAHIHGEIYRRRGWLTSEGKEIKNKDEILALLKALFLPKRLSIIHCPGHQKGHSAEARGNRMADQAARKAAITETPDTSTLLIENSSPNSRLINSGSETPGTSESATPESSKLEKFTNCYSLSKTLRFKAIPVGKTQENIDNKRLLVEDEKRAEDYKGVKKLLDRYYLSFINDVLHSIKLKNLNNYISLFRKKTRTEKENKELENLEINLRKEIAKAFKGNEGYKSLFKKDIIETILPEFLDDKDEIALVNSFNGFTTAFTGFFDNRENMFSEEAKSTSIAFRCINENLTRYISNMDIFEKVDAIFDKHEVQEIKEKILNSDYDVEDFFEGEFFNFVLTQEGIDVYNAIIGGFVTESGEKIKGLNEYINLYNQKTKQKLPKFKPLYKQVLSDRESLSFYGEGYTSDEEVLEVFRNTLNKNSEIFSSIKKLEKLFKNFDEYSSAGIFVKNGPAISTISKDIFGEWNVIRDKWNAEYDDIHLKKKAVVTEKYEDDRRKSFKKIGSFSLEQLQEYADADLSVVEKLKEIIIQKVDEIYKVYGSSEKLFDADFVLEKSLKKNDAVVAIMKDLLDSVKSFENYIKAFFGEGKETNRDESFYGDFVLAYDILLKVDHIYDAIRNYVTQKPYSKDKFKLYFQNPQFMGGWDKDKETDYRATILRYGSKYYLAIMDKKYAKCLQKIDKDDVNGNYEKINYKLLPGPNKMLPKVFFSKKWMAYYNPSEDIQKIYKNGTFKKGDMFNLNDCHKLIDFFKDSISRYPKWSNAYDFNFSETEKYKDIAGFYREVEEQGYKVSFESASKKEVDKLVEEGKLYMFQIYNKDFSDKSHGTPNLHTMYFKLLFDENNHGQIRLSGGAELFMRRASLKKEELVVHPANSPIANKNPDNPKKTTTLSYDVYKDKRFSEDQYELHIPIAINKCPKNIFKINTEVRVLLKHDDNPYVIGIDRGERNLLYIVVVDGKGNIVEQYSLNEIINNFNGIRIKTDYHSLLDKKEKERFEARQNWTSIENIKELKAGYISQVVHKICELVEKYDAVIALEDLNSGFKNSRVKVEKQVYQKFEKMLIDKLNYMVDKKSNPCATGGALKGYQITNKFESFKSMSTQNGFIFYIPAWLTSKIDPSTGFVNLLKTKYTSIADSKKFISSFDRIMYVPEEDLFEFALDYKNFSRTDADYIKKWKLYSYGNRIRIFRNPKKNNVFDWEEVCLTSAYKELFNKYGINYQQGDIRALLCEQSDKAFYSSFMALMSLMLQMANSITGRTDVDFLISPVKNSDGIFYDSRNYEAQENAILPKNADANGAYNIARKVLWAIGQFKKAEDEKLDKVKIAISNKEWLEYAQTSVKHSGGSKRTADGSEFEPKKKRKVGSGATNFSLLKQAGDVEENPGPMVSKGEELFTGVVPILVELDGDVNGHKFSVSGEGEGDATYGKLTLKFICTTGKLPVPWPTLVTTLTYGVQCFSRYPDHMKQHDFFKSAMPEGYVQERTIFFKDDGNYKTRAEVKFEGDTLVNRIELKGIDFKEDGNILGHKLEYNYNSHNVYIMADKQKNGIKVNFKIRHNIEDGSVQLADHYQQNTPIGDGPVLLPDNHYLSTQSALSKDPNEKRDHMVLLEFVTAAGITLGMDELYKSGGSPKKKRKV

SEQ ID NO: 92 - DNA, 231 bp, Artificial
  Synthetic tagRNA
tatttctataagtgtagattactcgtgtatatatactccgcaccgaggttggtacgaacaccgggagtctttaacacgaccgccacggatcaggatcacggagtgctcctgcaggttgtgaccttcaccaccgatgtaggaagtcacttcgaaaccgttagtcagacgaacacggcatactttacgcagcgcggagttcggtttacgaggagtggtagtatatacacgagt

SEQ ID NO: 93 - DNA, 218 bp, Artificial
  Synthetic tagRNA
taatttctactaagtgtagattacggctccgcagtggatggcggtaagtctccatagaatggaggacagcgcggagaatctcgctctctccaggggaagccgaagtttccaaaaggtcgttgatcaaagcgcggcgcgttgtttcatcaaggcgtacggtcaccgtaaccagcaaatcaatatcactgtgtggcttcaggccgccatccactgcggat

SEQ ID NO: 94 - DNA, 213 bp, Artificial
  Synthetic tagRNA
taatttcaactaagtgtagattacggctccgcagtggatggcggtaagtctccatagaatggagggcggagaatctcgctctctccaggggaagccgaagtttccaaaaggtcgttgatcaaagcgcggcgcgttgtttcatcaaggcgtacggtcaccgtaaccagcaaatcaatatcactgtgtggcttcaggccgccatccactgcggat

SEQ ID NO: 95 - DNA, 21 bp, Artificial
  Synthetic decoy hairpin
taagtctccatagaatggagg

SEQ ID NO: 96 - protein, 1267 aa, Artificial
  Synthetic LbCas12a polypeptide
MKRTADGSEFESPKKKRKVSKLEKFTNCYSLSKTLRFKAIPVGKTQENIDNKRLLVEDEKRAEDYKGVKKLLDRYYLSFINDVLHSIKLKNLNNYISLFRKKTRTEKENKELENLEINLRKEIAKAFKGNEGYKSLFKKDIIETILPEFLDDKDEIALVNSFNGFTTAFTGFFDNRENMFSEEAKSTSIAFRCINENLTRYISNMDIFEKVDAIFDKHEVQEIKEKILNSDYDVEDFFEGEFFNFVLTQEGIDVYNAIIGGFVTESGEKIKGLNEYINLYNQKTKQKLPKFKPLYKQVLSDRESLSFYGEGYTSDEEVLEVFRNTLNKNSEIFSSIKKLEKLFKNFDEYSSAGIFVKNGPAISTISKDIFGEWNVIRDKWNAEYDDIHLKKKAVVTEKYEDDRRKSFKKIGSFSLEQLQEYADADLSVVEKLKEIIIQKVDEIYKVYGSSEKLFDADFVLEKSLKKNDAVVAIMKDLLDSVKSFENYIKAFFGEGKETNRDESFYGDFVLAYDILLKVDHIYDAIRNYVTQKPYSKDKFKLYFQNPQFMGGWDKDKETDYRATILRYGSKYYLAIMDKKYAKCLQKIDKDDVNGNYEKINYKLLPGPNKMLPKVFFSKKWMAYYNPSEDIQKIYKNGTFKKGDMFNLNDCHKLIDFFKDSISRYPKWSNAYDFNFSETEKYKDIAGFYREVEEQGYKVSFESASKKEVDKLVEEGKLYMFQIYNKDFSDKSHGTPNLHTMYFKLLFDENNHGQIRLSGGAELFMRRASLKKEELVVAPANSPIANKNPDNPKKTTTLSYDVYKDKRFSEDQYELHIPIAINKCPKNIFKINTEVRVLLKHDDNPYVIGIDRGERNLLYIVVVDGKGNIVEQYSLNEIINNFNGIRIKTDYHSLLDKKEKERFEARQNWTSIENIKELKAGYISQVVHKICELVEKYDAVIALEDLNSGFKNSRVKVEKQVYQKFEKMLIDKLNYMVDKKSNPCATGGALKGYQITNKFESFKSMSTQNGFIFYIPAWLTSKIDPSTGFVNLLKTKYTSIADSKKFISSFDRIMYVPEEDLFEFALDYKNFSRTDADYIKKWKLYSYGNRIRIFRNPKKNNVFDWEEVCLTSAYKELFNKYGINYQQGDIRALLCEQSDKAFYSSFMALMSLMLQMRNSITGRTDVDFLISPVKNSDGIFYDSRNYEAQENAILPKNADANGAYNIARKVLWAIGQFKKAEDEKLDKVKIAISNKEWLEYAQTSVKHSGGSKRTADGSEFEPKKKRKV

SEQ ID NO: 97 - protein, 717 aa, Artificial
  Synthetic exonuclease
MKRTADGSEFESPKKKRKVTLNIEDEHRLHETSKEPDVSLGSTWLSDFPQAWAETGGMGLAVRQAPLIIPLKATSTPVSIKQYPMSQEARLGIKPHIQRLLDQGILVPCQSPWNTPLLPVKKPGTNDYRPVQDLREVNKRVEDIHPTVPNPYNLLSGLPPSHQWYTVLDLKDAFFCLRLHPTSQPLFAFEWRDPEMGISGQLTWTRLPQGFKNSPTLFNEALHRDLADFRIQHPDLILLQYVDDLLLAATSELDCQQGTRALLQTLGNLGYRASAKKAQICQKQVKYLGYLLKEGQRWLTEARKETVMGQPTPKTPRQLREFLGKAGFCRLFIPGFAEMAAPLYPLTKPGTLFNWGPDQQKAYQEIKQALLTAPALGLPDLTKPFELFVDEKQGYAKGVLTQKLGPWRRPVAYLSKKLDPVAAGWPPCLRMVAAIAVLTKDAGKLTMGQPLVILAPHAVEALVKQPPDRWLSNARMTHYQALLLDTDRVQFGPVVALNPATLLPLPEEGLQHNCLDILAEAHGTRPDLTDQPLPDADHTWYTDGSSLLQEGQRKAGAAVTTETEVIWAKALPAGTSAQRAELIALTQALKMAEGKKLNVYTDSRYAFATAHIHGEIYRRRGWLTSEGKEIKNKDEILALLKALFLPKRLSIIHCPGHQKGHSAEARGNRMADQAARKAAITETPDTSTLLIENSSPSGGSKRTADGSEFEPKKKRKV

SEQ ID NO: 98 - protein, 343 aa, Artificial
  Synthetic exonuclease
MKRTADGSEFESPKKKRKVEHPHNENAGSDPHRDCSDETGEVADPVIVEDIEPGIYYGISNENYHAGPGISKSQLDDIADTPALYLWRKNAPVDTTKTKTLDLGTAFHCRVLEPEEFSNRFIVAPEFNRRTNAGKEEEKAFLMECASTGKTVITAEEGRKIELMYQSVMALPLGQWLVESAGHAESSIYWEDPETGILCRCRPDKIIPEFHWIMDVKTTADIQRFKTAYYDYRYHVQDAFYSDGYEAQFGVQPTFVFLVASTTIECGRYPVEIFMMGEEAKLAGQQEYHRNLRTLSDCLNTDEWPAIKTLSLPRWAKEYANDSGGSKRTADGSEFEPKKKRKV

SEQ ID NO: 99 - protein, 617 aa, Artificial
  Synthetic exonuclease
MKRTADGSEFESPKKKRKVMKQQIQLRRREVDETADLPAELPPLLRRLYASRGVRSAQELERSVKGMLPWQQLSGVEKAVEILYNAFREGTRIIVVGDFDADGATSTALSVLAMRSLGCSNIDYLVPNRFEDGYGLSPEVVDQAHARGAQLIVTVDNGISSHAGVEHARSLGIPVIVTDHHLPGDTLPAAEAIINPNLRDCNFPSKSLAGVGVAFYLMLALRTFLRDQGWFDERNIAIPNLAELLDLVALGTVADVVPLDANNRILTWQGMSRIRAGKCRPGIKALLEVANRDAQKLAASDLGFALGPRLNAAGRLDDMSVGVALLLCDNIGEARVLANELDALNQTRKEIEQGMQIEALTLCEKLERSRDTLPGGLAMYHPEWHQGVVGILASRIKERFHRPVIAFAPAGDGTLKGSGRSIQGLHMRDALERLDTLYPGMMLKFGGHAMAAGLSLEEDKFKLFQQRFGELVTEWLDPSLLQGEVVSDGPLSPAEMTMEVAQLLRDAGPWGQMFPEPLFDGHFRLLQQRLVGERHLKVMVEPVGGGPLLDGIAFNVDTALWPDNGVREVQLAYKLDINEFRGNRSLQIIIDNIWPISGGSKRTADGSEFEPKKKRKV

SEQ ID NO: 100 - protein, 330 aa, Artificial
  Synthetic exonuclease
MKRTADGSEFESPKKKRKVSKSWGKFIEEEEAEMASRRNLMIVDGTNLGFRFKHNNSKKPFASSYVSTIQSLAKSYSARTTIVLGDKGKSVFRLEHLPEYKGNRDEKYAQRTEEEKALDEQFFEYLKDAFELCKTTFPTFTIRGVEADDMAAYIVKLIGHLYDHVWLISTDGDWDTLLTDKVSRFSFTTRREYHLRDMYEHHNVDDVEQFISLKAIMGDLGDNIRGVEGIGAKRGYNIIREFGNVLDIIDQLPLPGKQKYIQNLNASEELLFRNLILVDLPTYCVDAIAAVGQDVLDKFTKDILEIAEQSGGSKRTADGSEFEPKKKRKV

SEQ ID NO: 101 - protein, 340 aa, Artificial
  Synthetic exonuclease
MKRTADGSEFESPKKKRKVMALLDLKQFYELREGCDDKGILVMDGDWLVFQAMSAAEFDASWEEEIWHRCCDHAKARQILEDSIKSYETRKKAWAGAPIVLAFTDSVNWRKELVDPNYKANRKAVKKPVGYFEFLDALFEREEFYCIREPMLEGDDVMGVIASNPSAFGARKAVIISCDKDFKTIPNCDFLWCTTGNILTQTEESADWWHLFQTIKGDITDGYSGIAGWGDTAEDFLNNPFITEPKTSVLKSGKNKGQEVTKWVKRDPEPHETLWDCIKSIGAKAGMTEEDIIKQGQMARILRFNEYNFIDKEIYLWRPSGGSKRTADGSEFEPKKKRKV

SEQ ID NO: 102 - DNA, 283 bp, Homo sapiens
ctgtgaggattgagtgagttgcacgtgtcaagtgcttagagcaggcgtgctgcacacagcaggcctttggtcaggttggctgctgggctggccctggggccgtttccctcactcctgctcggtgaatttggctcagcaggcacctgcctcagctgctcacttgagcctctgggtctagaaccctctggggaccgtttgaggagtgttcagtctccgtgaacgttcccttagcactctgccacttattgggtcagctgttaacatcagtacgttaatgtttcct

SEQ ID NO: 103 - DNA, 23 bp, Artificial
  Synthetic spacer sequence
cctcactcctgctcggtgaattt

SEQ ID NO: 104 - DNA, 298 bp, Homo sapiens
gagtcaaggaacacggataaagacgctgggagattgacatgcatttcgaccaatagcattgcagagaggcgtatcatttcgcggatgttccaatcagtacgcagagagtcgccgtctccaaggtgaaagcggaagtagggccttcgcgcacctcatggaatcccttctgcagcacctggatcgcttttccgagcttctggcggtctcaagcactacctacgtcagcacctgggaccccgccaccgtgcgccgggccttgcagtgggcgcgctacctgcgccacatccatcggcgcttt

SEQ ID NO: 105 - DNA, 23 bp, Artificial
  Synthetic spacer sequence
gcggatgttccaatcagtacgca

SEQ ID NO: 106 - protein, 1367 aa, Artificial sequence
  Synthetic nCas9
DKKYSIGLAIGTNSVGWAVITDEYKVPSKKFKVLGNTDRHSIKKNLIGALLFDSGETAEATRLKRTARRRYTRRKNRICYLQEIFSNEMAKVDDSFFHRLEESFLVEEDKKHERHPIFGNIVDEVAYHEKYPTIYHLRKKLVDSTDKADLRLIYLALAHMIKFRGHFLIEGDLNPDNSDVDKLFIQLVQTYNQLFEENPINASGVDAKAILSARLSKSRRLENLIAQLPGEKKNGLFGNLIALSLGLTPNFKSNFDLAEDAKLQLSKDTYDDDLDNLLAQIGDQYADLFLAAKNLSDAILLSDILRVNTEITKAPLSASMIKRYDEHHQDLTLLKALVRQQLPEKYKEIFFDQSKNGYAGYIDGGASQEEFYKFIKPILEKMDGTEELLVKLNREDLLRKQRTFDNGSIPHQIHLGELHAILRRQEDFYPFLKDNREKIEKILTFRIPYYVGPLARGNSRFAWMTRKSEETITPWNFEEVVDKGASAQSFIERMTNFDKNLPNEKVLPKHSLLYEYFTVYNELTKVKYVTEGMRKPAFLSGEQKKAIVDLLFKTNRKVTVKQLKEDYFKKIECFDSVEISGVEDRFNASLGTYHDLLKIIKDKDFLDNEENEDILEDIVLTLTLFEDREMIEERLKTYAHLFDDKVMKQLKRRRYTGWGRLSRKLINGIRDKQSGKTILDFLKSDGFANRNFMQLIHDDSLTFKEDIQKAQVSGQGDSLHEHIANLAGSPAIKKGILQTVKVVDELVKVMGRHKPENIVIEMARENQTTQKGQKNSRERMKRIEEGIKELGSQILKEHPVENTQLQNEKLYLYYLQNGRDMYVDQELDINRLSDYDVDHIVPQSFLKDDSIDNKVLTRSDKNRGKSDNVPSEEVVKKMKNYWRQLLNAKLITQRKFDNLTKAERGGLSELDKAGFIKRQLVETRQITKHVAQILDSRMNTKYDENDKLIREVKVITLKSKLVSDFRKDFQFYKVREINNYHHAHDAYLNAVVGTALIKKYPKLESEFVYGDYKVYDVRKMIAKSEQEIGKATAKYFFYSNIMNFFKTEITLANGEIRKRPLIETNGETGEIVWDKGRDFATVRKVLSMPQVNIVKKTEVQTGGFSKESILPKRNSDKLIARKKDWDPKKYGGFDSPTVAYSVLVVAKVEKGKSKKLKSVKELLGITIMERSSFEKNPIDFLEAKGYKEVKKDLIIKLPKYSLFELENGRKRMLASAGELQKGNELALPSKYVNFLYLASHYEKLKGSPEDNEQKQLFVEQHKHYLDEIIEQISEFSKRVILADANLDKVLSAYNKHRDKPIREQAENIIHLFTLTNLGAPAAFKYFDTTIDRKRYTSTKEVLDATLIHQSITGLYETRIDLSQLGGD

SEQ ID NO: 107 - protein, 1367 aa, Artificial sequence
  Synthetic enCas9
DKKYSIGLAIGTNSVGWAVITDEYKVPSKKFKVLGNTDRHSIKKNLIGALLFDSGETAEATRLKRTARRRYTRRKNRICYLQEIFSNEMAKVDDSFFHRLEESFLVEEDKKHERHPIFGNIVDEVAYHEKYPTIYHLRKKLVDSTDKADLRLIYLALAHMIKFRGHFLIEGDLNPDNSDVDKLFIQLVQTYNQLFEENPINASGVDAKAILSARLSKSRRLENLIAQLPGEKKNGLFGNLIALSLGLTPNFKSNFDLAEDAKLQLSKDTYDDDLDNLLAQIGDQYADLFLAAKNLSDAILLSDILRVNTEITKAPLSASMIKRYDEHHQDLTLLKALVRQQLPEKYKEIFFDQSKNGYAGYIDGGASQEEFYKFIKPILEKMDGTEELLVKLNREDLLRKQRTFDNGSIPHQIHLGELHAILRRQEDFYPFLKDNREKIEKILTFRIPYYVGPLARGNSRFAWMTRKSEETITPWNFEEVVDKGASAQSFIERMTNFDKNLPNEKVLPKHSLLYEYFTVYNELTKVKYVTEGMRKPAFLSGEQKKAIVDLLFKTNRKVTVKQLKEDYFKKIECFDSVEISGVEDRFNASLGTYHDLLKIIKDKDFLDNEENEDILEDIVLTLTLFEDREMIEERLKTYAHLFDDKVMKQLKRRRYTGWGRLSRKLINGIRDKQSGKTILDFLKSDGFANRNFMQLIHDDSLTFKEDIQKAQVSGQGDSLHEHIANLAGSPAIKKGILQTVKVVDELVKVMGRHKPENIVIEMARENQTTQKGQKNSRERMKRIEEGIKELGSQILKEHPVENTQLQNEKLYLYYLQNGRDMYVDQELDINRLSDYDVDHIVPQSFLADDSIDNKVLTRSDKNRGKSDNVPSEEVVKKMKNYWRQLLNAKLITQRKFDNLTKAERGGLSELDKAGFIKRQLVETRQITKHVAQILDSRMNTKYDENDKLIREVKVITLKSKLVSDFRKDFQFYKVREINNYHHAHDAYLNAVVGTALIKKYPALESEFVYGDYKVYDVRKMIAKSEQEIGKATAKYFFYSNIMNFFKTEITLANGEIRKAPLIETNGETGEIVWDKGRDFATVRKVLSMPQVNIVKKTEVQTGGFSKESILPKRNSDKLIARKKDWDPKKYGGFDSPTVAYSVLVVAKVEKGKSKKLKSVKELLGITIMERSSFEKNPIDFLEAKGYKEVKKDLIIKLPKYSLFELENGRKRMLASAGELQKGNELALPSKYVNFLYLASHYEKLKGSPEDNEQKQLFVEQHKHYLDEIIEQISEFSKRVILADANLDKVLSAYNKHRDKPIREQAENIIHLFTLTNLGAPAAFKYFDTTIDRKRYTSTKEVLDATLIHQSITGLYETRIDLSQLGGD

SEQ ID NO: 108 - DNA, 4101 bp, Artificial sequence
  Synthetic Cas9
gacaagaagtacagcatcgggctggcgatcgggaccaactccgtcggctgggctgtgattaccgacgagtacaaggtgccatccaagaagttcaaggtcctcggcaacactgaccggcacagcattaagaagaacctgattggggcgctgctgttcgattcgggggagactgcggaggcgaccaggctgaagcggactgcgcgccggaggtacaccaggaggaagaatcggatctgctacctccaggagattttctcgaatgagatggccaaggtggacgattccttcttccatcgcctggaggagtcgttcctcgttgaggaggacaagaagcatgagaggcatcccattttcgggaatatcgttgacgaggtggcttaccatgagaagtacccgaccatctaccatctgcggaagaagctcgtcgattcgaccgataaggccgacctgcggctgatctacctggccctcgcgcacatgattaagttccggggccatttcctcatcgagggcgacctcaacccggacaactcggacgtggataagctcttcattcagctcgtgcagacatacaaccagctcttcgaggagaatcccattaacgcctcgggggtcgacgctaaggctattctctcggctcggctgtcgaagtcgcgccggctggagaatctcattgcccagctcccaggcgagaagaagaacggcctcttcggcaacctgattgccctgtcgctggggctcacaccgaatttcaagtcgaacttcgacctcgccgaggacgctaagctccagctcagcaaggatacttacgatgatgacctcgataacctgctcgcccagattggggatcagtacgcggatctgttcctcgcggccaagaatctcagcgatgctattctcctgtcggacattctccgcgtcaacacagagattactaaggccccactgtcggcgagcatgattaagaggtacgatgagcatcatcaggacctgacactgctcaaggcgctggtccggcagcagctccccgagaagtacaaggagattttcttcgatcagtcaaagaatgggtacgcgggctacattgatggcggcgcgtcccaggaggagttctacaagttcattaagcccatcctggagaagatggacgggaccgaggagctgctggtgaagctcaatcgggaggacctgctccggaagcagcgcacattcgacaatggctcgattcctcaccagattcacctgggcgagctgcacgccattctccgcaggcaggaggacttctacccgttcctcaaggacaaccgcgagaagatcgagaagatcctgaccttccggattccatactacgtggggccgctcgcgcgggggaactcccggttcgcgtggatgactcgcaagtccgaagaaacgattacaccgtggaatttcgaggaggtcgtcgacaagggcgctagtgcgcagtcattcattgagaggatgaccaatttcgataagaacctgcctaacgagaaggtgctgccgaagcattcgctgctctacgagtacttcaccgtttacaatgagctgaccaaggtgaagtatgtgactgagggcatgaggaagccagcgttcctgagcggcgagcagaagaaggctatcgtggacctgctcttcaagactaaccggaaggtgactgtgaagcagctcaaggaggactacttcaagaagattgagtgcttcgattccgttgagattagcggggtggaggatcggttcaatgcttcgctcgggacataccacgatctcctgaagatcattaaggataaggacttcctcgacaacgaggagaacgaggacattctcgaagatattgtcctgaccctcaccctcttcgaggatcgggagatgatcgaggagaggctcaagacatacgctcatctgttcgatgataaggtcatgaagcagctgaagcgcaggcggtacacagggtgggggcggctgagccggaagctgatcaacgggattcgggataagcagtccgggaagacaattctcgacttcctcaagtccgacgggttcgctaaccggaacttcatgcagctcattcatgatgactcgctgacattcaaggaggatattcagaaggcgcaggtttcggggcagggcgactcgctccacgagcatattgcgaatctggcgggctcccccgcgattaagaagggcattctgcaaaccgtcaaggtggttgatgagctggtcaaggtcatggggcggcataagccagagaatattgtcatcgagatggcgcgggagaatcagaccacacagaaggggcagaagaactcacgggagcggatgaagcgcatcgaggagggcatcaaggagctggggtcgcagatcctgaaggagcatcccgtggagaacactcagctgcaaaatgagaagctgtacctctactacctccagaacgggagggacatgtatgtggatcaggagctggatattaataggctgagcgattacgatgtcgaccacattgtcccacagtcgttcctgaaggacgacagcattgacaacaaggtgctgacccgctcggataagaacaggggcaagagcgataatgttccaagcgaggaggttgtgaagaagatgaagaactactggcggcagctcctgaacgcgaagctcatcacacagcggaagttcgacaacctcaccaaggctgagcgcgggggcctgagcgagctggacaaggcggggttcattaagaggcagctggtcgagacacggcagattacaaagcatgttgcgcagattctcgattcccggatgaacaccaagtacgatgagaacgataagctgattcgggaggtcaaggtaattaccctgaagtccaagctggtgtccgacttcaggaaggacttccagttctacaaggttcgggagatcaacaactaccaccacgcgcatgatgcctacctcaacgcggtcgtggggaccgctctcatcaagaagtacccaaagctggagtcagagttcgtctacggggattacaaggtttacgacgtgcggaagatgatcgctaagagcgagcaggagattggcaaggctaccgctaagtacttcttctactccaacatcatgaacttcttcaagacagagattaccctcgcgaatggcgagatccggaagaggcccctcatcgagacaaatggggagacaggggagattgtctgggataaggggcgggatttcgcgaccgtccggaaggtcctgtcgatgccccaggttaatattgtcaagaagactgaggtccagactggcggcttctcaaaggagtcgattctcccaaagaggaactccgataagctcattgctcggaagaaggattgggaccccaagaagtacgggggattcgactcccccactgttgcttactctgttctggttgttgctaaggtggagaaggggaagtcgaagaagctgaagagcgtgaaggagctgctcgggattacaattatggagaggtcatccttcgagaagaatcccatcgacttcctggaggccaagggctacaaggaggtgaagaaggacctgattattaagctgcccaagtactcgctcttcgagctggagaatgggcggaagcggatgctggcgtccgcgggggagctgcaaaaggggaacgagctggcgctcccctccaagtatgtgaacttcctctacctggcgtcgcactacgagaagctgaaggggtccccagaggataatgagcagaagcagctcttcgtcgagcagcataagcactacctggacgagattatcgagcagattagcgagttctcgaagcgggtcatcctcgcggatgcgaacctggataaggtgctcagcgcctacaataagcaccgggacaagccgattcgggagcaggcggagaatattattcacctcttcacactcaccaacctcggggcaccagctgcgttcaagtacttcgacactactatcgaccggaagcggtacacctcgacgaaggaggtgctcgacgccaccctcattcaccagtcgatcacaggcctgtacgagacacggattgacctgtcccagctcgggggcgac

SEQ ID NO: 109 - DNA, 4101 bp, Artificial sequence
  Synthetic Cas9
gacaagaagtactccattggcctggcgattgggacaaactcggtggggtgggccgtgattacggatgagtacaaggttccaagcaagaagttcaaggtcctcgggaacacagatcggcattcgattaagaagaatctcattggggcgctcctcttcgactcgggggagacagcggaggctaccaggctcaagcggacagccaggcggcggtacacaaggcggaagaatcgcatctgctacctccaggagattttctcgaatgagatggcgaaggtggacgacagcttcttccatcggctggaggagtccttcctggtggaggaggataagaagcacgagaggcatccaattttcgggaacatcgtggacgaggttgcgtaccatgagaagtaccctacaatctaccatctgcggaagaagctggttgactccacagacaaggcggacctgaggctgatctacctcgctctggcccacatgattaagttccgcgggcatttcctgatcgagggggacctgaatcccgacaattcggatgtggacaagctcttcatccagctggtgcagacctacaaccagctgttcgaggagaatcccatcaatgcgtcgggcgttgacgctaaggccattctgtccgctaggctgtcgaagagcaggaggctggagaacctgatcgcccagctgccaggcgagaagaagaatgggctcttcgggaatctgattgcgctctccctggggctgacaccgaacttcaagagcaatttcgatctggctgaggacgcgaagctccagctctcgaaggacacttacgacgatgacctcgataacctcctcgcgcagatcggggaccagtacgctgatctcttcctcgccgctaagaacctctcggatgctatcctgctctccgacattctccgggttaataccgagattacaaaggccccactgtcggcgtccatgatcaagcggtacgatgagcatcatcaggatctcaccctgctcaaggccctcgtgcggcagcagctgcccgagaagtacaaggagattttcttcgaccagagcaagaatgggtacgctggctacattgacggcggggcctcacaggaggagttctacaagttcatcaagccaatcctggagaagatggatgggacagaggagctgctggtgaagctcaaccgggaggatctgctcaggaagcagcggacgttcgacaacgggtcgattccccatcagatccacctgggggagctgcacgcgatcctgcgccggcaggaggatttctaccctttcctgaaggataatcgggagaagatcgagaagattctcaccttccggattccctactacgtcgggccactcgcgcggggcaatagcaggttcgcctggatgacacggaagagcgaggagacaatcaccccctggaacttcgaggaggttgtcgacaagggggcgtccgcccagtcattcattgagcggatgaccaatttcgacaagaatctgccaaatgagaaggttctcccaaagcatagcctcctctacgagtacttcactgtttacaacgagctgaccaaggtgaagtatgtgaccgagggcatgcggaagcccgcgttcctgtccggcgagcagaagaaggccattgtggacctcctgttcaagaccaatcgcaaggtcacagtcaagcagctcaaggaggattacttcaagaagatcgagtgcttcgactcggttgagattagcggggtggaggatcggttcaacgcgagcctcggcacttaccacgacctcctgaagatcatcaaggataaggacttcctcgacaacgaggagaacgaggatattctggaggacatcgtgctcaccctgacgctgttcgaggatcgggagatgatcgaggagcgcctgaagacctacgctcatctcttcgatgataaggtcatgaagcagctgaagaggaggcggtacaccgggtggggccgcctgagcaggaagctcattaacgggatcagggacaagcagagcggcaagaccatcctggacttcctcaagagcgatggcttcgccaaccggaatttcatgcagctcatccacgacgactccctcaccttcaaggaggacattcagaaggctcaggtcagcggccagggcgactcgctgcatgagcacatcgctaacctggcgggcagcccagccatcaagaagggcatcctccagacagtgaaggtcgtggatgagctggtgaaggtcatgggccggcataagcccgagaatattgtgattgagatggcgcgggagaatcagaccactcagaagggccagaagaactcgcgggagcgcatgaagaggatcgaggaggggattaaggagctgggcagccagattctcaaggagcaccccgtggagaatacccagctccagaacgagaagctgtacctctactacctccagaatgggcgggacatgtatgttgatcaggagctggacatcaatcgcctctcggattacgacgtggaccacatcgtgccccagagcttcctgaaggatgatagcatcgacaataaggtcctgacccgctccgacaagaatcgcggcaagagcgacaacgtgccgagcgaggaggtcgtgaagaagatgaagaactactggcggcagctgctgaacgcgaagctcattacacagcggaagttcgataacctgacgaaggcggagaggggcggcctctccgagctggacaaggcgggcttcattaagaggcagctcgtggagactcgccagatcaccaagcacgtggctcagatcctcgatagccggatgaatacgaagtacgatgagaatgacaagctcatccgggaggtgaaggtaatcaccctgaagtcaaagctcgttagcgatttccggaaggacttccagttctacaaggtgcgggagattaacaactaccatcatgcgcacgatgcgtacctcaatgcggtggtgggcacagccctgattaagaagtaccccaagctggagagcgagttcgtctacggggactacaaggtgtacgatgttcggaagatgatcgccaagagcgagcaggagattgggaaggccaccgctaagtacttcttctactcgaatattatgaatttcttcaagaccgagatcacactcgctaatggggagattcggaagcggcccctcatcgagactaacggggagactggcgagattgtgtgggacaaggggcgcgacttcgctaccgtgcgcaaggtcctctcgatgccccaggttaatattgttaagaagacagaggtgcagacgggcgggttctccaaggagtctatcctgccgaagcggaactcggacaagctgatcgcccgcaagaaggattgggaccccaagaagtacgggggattcgatagcccaaccgtggcttacagcgtcctggtggtcgccaaggttgagaaggggaagtcgaagaagctcaagagcgttaaggagctgctgggcatcaccatcatggagcggtccagcttcgagaagaatcctatcgacttcctggaggctaaggggtacaaggaggtcaagaaggacctgatcattaagctgcccaagtactctctgttcgagctggagaacgggaggaagcggatgctggcgtctgctggcgagctacagaagggcaatgagctggcgctcccctcgaagtatgtcaacttcctctacctggcttcccattacgagaagctgaagggctcgcccgaggataatgagcagaagcagctcttcgtggagcagcacaagcactacctcgacgagatcattgagcagatttcggagttctcgaagcgggtcattctcgcggacgcgaacctcgacaaggtcctctcggcgtacaacaagcaccgggacaagcccatccgggagcaggccgagaacattatccacctcttcacactgaccaacctcggcgctcccgccgcgttcaagtacttcgacaccaccattgaccgcaagagatacacatccaccaaggaggtgctggacgcgaccctcatccaccagagcatcacaggcctctacgagacacggatcgacctctcgcagctcgggggcgat

SEQ ID NO: 110 - DNA, 4092 bp, Artificial sequence
  Synthetic Cas9
gacaagaagtactcgatcggcctggcgattggcacaaacagcgtggggtgggctgtgatcactgatgagtacaaggtgccatcgaagaagttcaaggtgctggggaatacagaccggcattcgatcaagaagaatctcattggcgctctcctcttcgattccggcgagactgctgaggcgacccgcctgaagcgcaccgcccggcggcgctacactcggcggaagaataggatttgctacctccaggagattttctcgaatgagatggccaaggtggatgacagcttcttccaccgcctggaggagtcgttcctggtcgaggaggacaagaagcatgagcggcaccctatcttcgggaatatcgttgatgaggtcgcctaccacgagaagtaccccactatctaccatctccgcaagaagctcgtggacagcacagataaggccgacctccgcctgatctacctcgccctcgcgcacatgattaagttccgggggcacttcctcattgagggggatctgaatcccgataactccgacgtggacaagctgttcatccagctggtgcagacatacaaccagctgttcgaggagaatcccatcaacgcgagcggcgtggacgctaaggccattctgtcggctaggctctcgaagtcgaggcggctggagaacctgattgcgcagctccccggcgagaagaagaacgggctgttcgggaatctcatcgccctctccctcggcctcacaccaaacttcaagagcaatttcgacctggctgaggacgctaagctgcaactctcaaaggatacatacgatgacgacctggacaatctcctggctcagatcggcgaccagtacgctgacctgttcctcgcggccaagaatctgtcggacgcgattctcctcagcgacatcctgcgcgtcaataccgagattacgaaggctccactgtctgcgtcaatgattaagcggtacgatgagcatcaccaggatctgaccctcctgaaggcgctcgtgcggcagcagctgcccgagaagtacaaggagattttcttcgatcagagcaagaatggctacgccggctacatcgacgggggcgcgagccaggaggagttctacaagttcatcaagcccatcctggagaagatggacggcaccgaggagctactcgtgaagctcaatcgggaggatctcctccggaagcagcggacattcgataacgggtctatcccacaccagatccacctcggcgagctgcatgcgattctgcggcggcaggaggatttctaccctttcctgaaggacaaccgggagaagatcgagaagatcctcacattccggattccatactacgtcggccccctggcgaggggcaatagccggttcgcgtggatgacaaggaagtccgaggagactattaccccgtggaatttcgaggaggtggttgacaagggcgcttccgcgcagagcttcattgagcggatgacaaacttcgacaagaatctccccaacgagaaggtcctgccgaagcatagcctcctgtacgagtacttcaccgtctacaatgagctaactaaggtcaagtatgtgacagagggcatgaggaagccagccttcctctcaggcgagcagaagaaggccattgtggacctcctgttcaagacaaaccgcaaggtgacagtgaagcagctgaaggaggattacttcaagaagattgagtgcttcgactcagtggagatttcaggcgtggaggatcggttcaacgcgagcctggggacttaccacgacctgctgaagattattaaggacaaggacttcctggataacgaggagaatgaggacatcctggaggatattgtgctcaccctcaccctgttcgaggacagggagatgattgaggagaggctcaagacctacgcgcacctgttcgatgacaaggtcatgaagcagctgaagaggcggcgctacactgggtggggccgcctgtcgcggaagctgatcaacggcattcgggataagcagtccgggaagaccattctggatttcctgaagtcggacggcttcgccaacaggaatttcatgcagctgatccacgacgactccctcaccttcaaggaggacattcagaaggcccaggttagcggccagggggactcactccacgagcatattgccaatctggccggctctccagctatcaagaagggcatcctgcaaacagttaaggttgttgacgagctggttaaggtcatggggcggcataagcccgagaacattgtcatcgagatggctcgggagaaccagacaactcagaagggccagaagaactccagggagcgcatgaagcggattgaggagggcattaaggagctggggtcccagatcctcaaggagcaccctgtcgagaacactcagctgcaaaacgagaagctctacctgtactacctccagaacgggcgggatatgtatgtggatcaggagctggacatcaacaggctctccgactacgacgtggatcacattgtcccacagtctttcctcaaggatgattccatcgacaacaaggtgctgacgcgcagcgacaagaatagggggaagtcggacaacgttccgagcgaggaggtcgtgaagaagatgaagaattactggaggcagctcctgaatgcgaagctgatcactcagaggaagttcgacaatctgacaaaggcggagaggggcgggctctcggagctggataaggcgggcttcatcaagcggcagctcgttgaaacccggcagatcaccaagcatgtcgcccagatcctcgatagccgcatgaacaccaagtacgatgagaacgacaagctcattcgggaggttaaggtcattacgctgaagtccaagctcgtcagcgacttcaggaaggatttccagttctacaaggttcgggagattaacaactaccaccacgcgcatgatgcgtacctgaacgctgttgtcggcactgctctcatcaagaagtacccaaagctggagtccgagttcgtctacggggactacaaggtctacgatgtccggaagatgatcgccaagtcggagcaggagatcgggaaggctactgcgaagtacttcttctacagcaacattatgaatttcttcaagacggagattacgctggcgaacggggagattaggaagaggcccctcattgagactaatggggagacaggcgagattgtttgggacaagggccgcgacttcgcgactgtgcggaaggtcctgtccatgccacaggtgaatattgttaagaagacagaggtgcagactgggggcttctcgaaggagagcattctcccaaagcggaacagcgataagctcatcgcgcgcaagaaggattgggaccctaagaagtacggcggcttcgattctcccactgtggcctactccgttctcgtggttgccaaggttgagaaggggaagtcgaagaagctgaagtcggtcaaggagctgctcgggattacaatcatggagcggagcagcttcgagaagaaccctattgatttcctggaggccaagggctacaaggaggttaagaaggatctcattatcaagctccctaagtactctctgttcgagctggagaatggccggaagaggatgctggcctcggctggcgagctacagaaggggaatgagctggccctcccgtcgaagtatgtgaatttcctgtacctcgcgtcgcactacgagaagctcaagggcagcccggaggataatgagcagaagcagctcttcgtggagcagcataagcactacctggacgagatcattgagcagatcagcgagttctcgaagcgggttattctggctgatgctaacctggacaaggttctgagcgcctacaataagcatcgcgacaagccgattcgcgagcaggcggagaatattatccacctgttcaccctcactaacctcggggctcccgcggccttcaagtacttcgataccacaatagataggaagcggtacacctcgacgaaggaggtcctcgacgccacactcatccatcagtcgattacaggcctgtacgagacacggattgacctctcgcagctg

SEQ ID NO: 111 - DNA, 4101 bp, Artificial sequence
  Synthetic Cas9
gacaagaagtattccataggcctggctatcggcaccaacagcgtgggctgggccgtcatcaccgacgagtacaaagtgccgagtaaaaagttcaaagtgctcggcaacaccgaccgccactccataaagaaaaacctgatcggggcgctcctgttcgacagcggcgagacggcggaggccacccgcttgaaacgcacggcccgacggcgctacacgcggcgcaagaaccggatctgttacctacaggagattttctctaacgagatggcgaaggtggacgactcgttctttcaccgcctcgaagagtccttcctcgtggaggaggacaagaaacacgagcgccacccgatcttcggcaacatcgtggacgaggtggcctaccacgagaagtacccgaccatctaccacctccggaagaaactcgtggacagcacggacaaggccgacctgaggctcatctacctcgccctggcgcacatgattaagttccggggccacttcctgatcgagggcgacctgaacccggacaacagcgacgtggacaagctgttcatccagctagtccagacctacaaccagcttttcgaggaaaaccccatcaacgccagcggggtggacgcgaaggcgatcctgtccgcccggctgagcaagtcccggcggctggagaacctcatcgcgcagttgcccggcgagaagaagaacgggctgttcgggaacctgatcgccctctccctggggctcaccccgaacttcaagtccaacttcgacctcgccgaggacgccaaactacagctgagcaaggacacctacgacgacgacctcgacaacctgctggcccagatcggggaccagtacgcagacctgttcctcgccgccaagaacctctccgacgccatcctgctgtcggacatcctgcgggtgaacacggagatcacgaaggccccgctctcggcctcgatgattaaacgctacgacgagcaccaccaggacttgaccctcctcaaggcgctggtccgccagcagcttcccgagaagtacaaggaaatctttttcgatcagagcaagaacgggtacgccgggtacatcgacggcggggcgtcccaggaggagttctacaagttcatcaagcccatcctggagaaaatggacgggaccgaggagctgctcgtgaagctcaaccgcgaagatttgctccgcaagcagcgcacgttcgacaacgggtcgatcccgcaccagatccacctgggcgagctgcacgcgatcctcaggcgtcaggaagacttctaccccttcctcaaggacaaccgcgagaagatagagaagattctgaccttcagaattccttattacgtgggcccgctggctcggggcaactcgcgcttcgcctggatgacgcgcaagtccgaggagaccatcaccccgtggaacttcgaggaggtggtggataagggtgcctcggcccagtccttcatcgagcggatgaccaacttcgacaagaacctgccgaacgagaaggtgctccccaagcacagcctgctctacgaatatttcacggtgtacaacgagctgacgaaggtcaagtacgtgaccgagggaatgaggaaacctgcattcctctccggggagcagaagaaagccatagtcgacctcctgttcaagaccaaccggaaggtcaccgtcaagcagctcaaggaggactacttcaagaagatcgagtgcttcgattcagtggagatcagcggcgtcgaggaccggttcaacgccagcctgggcacctaccacgacctgctcaagatcatcaaggacaaggacttcctcgacaacgaggagaacgaggacatcctggaggacatcgtgctgaccctgacgctcttcgaggaccgcgagatgatcgaggagcgcctcaagacctacgcccacctgttcgacgacaaggtgatgaagcagctcaagcggcggagatatactgggtggggccgcctctcccggaagctcattaacggtatcagggataagcagtccgggaagacgatcctcgacttcctcaagtcggacgggttcgccaaccgcaacttcatgcagctcatccacgacgactccctgacgttcaaggaggacatccagaaggcccaagtgtctggtcaaggtgactcgctccacgagcacatcgccaacctcgcgggcagcccggccatcaagaagggaatactccagaccgtcaaggtggtggacgagctggtgaaggtcatgggccgccacaagccggagaacatcgtcatcgagatggcgcgggagaaccagaccacgcagaaggggcagaaaaatagccgtgagcgcatgaagcgcatcgaggaggggattaaggagttgggcagccagatcctcaaggagcaccctgtggagaacacgcagttgcaaaacgagaagctctacctgtactacctccagaacgggagggatatgtacgtggaccaagaactggacatcaaccgcctgtccgactacgacgtggaccacatcgtgccgcagagcttcctcaaggacgacagcatcgacaacaaggtgctcacccggtccgacaagaatcggggcaagtccgacaacgtgcccagcgaggaggtcgtcaaaaagatgaaaaactactggcgacaactactgaacgccaagctcatcacccagcgcaagttcgacaacctcacaaaagccgagcgcggcgggttgagcgagctggacaaggccgggttcatcaagcgccagctcgtcgagacgcgccagatcacgaagcacgtcgcgcagatactcgacagccggatgaacaccaagtacgacgagaacgacaagctcatccgggaggtgaaggtcatcaccctcaagtcgaagctcgtgagcgacttccgcaaggacttccagttctacaaggtccgggagatcaacaactaccaccacgcccacgatgcttatcttaacgccgtggtggggacggccctcattaagaaatacccgaagctggagtcggagttcgtgtacggcgactacaaggtgtacgacgtcaggaagatgatcgccaagtccgaacaggagatcgggaaggccacggcgaaatacttcttctacagcaacatcatgaacttcttcaagaccgagatcaccctcgccaacggcgagatccgcaagcgcccgctcatcgagacgaacggggagaccggcgagatcgtctgggacaaggggcgcgacttcgccactgtgcggaaggtgctgtcgatgccccaggtcaacatcgtcaagaagacggaggtccagacgggcgggttcagcaaggagagcatcctgccgaagcgcaacagcgacaagctgatcgcccgcaaaaaggactgggatccaaaaaagtacggcggcttcgacagccccaccgtcgcctacagcgtcctcgtcgtcgctaaagtcgagaagggcaagtccaaaaagctcaagagcgtcaaggagctgctcgggatcaccatcatggagcggtccagcttcgagaagaacccaattgatttcctggaggcgaagggctacaaggaggtcaagaaagacctcatcataaagctgccgaagtactcactcttcgagctggagaacgggcgcaagcggatgctggcgtcggccggagagctccaaaagggcaacgagctggcgctgccgagcaagtacgtgaacttcctctacctggcgtcccactacgagaagctcaagggcagtccagaggataacgagcagaagcagctattcgtggagcagcacaagcactacctggacgagatcatcgagcagatcagcgagttctccaagcgcgtcatcctggcggacgccaacctggacaaggtgctgtccgcgtacaacaagcaccgcgacaagccgatccgcgagcaagccgagaacatcatccacctgttcaccctcacgaacctcggggcacccgccgccttcaaatatttcgacacgaccatcgaccgcaagcgctacaccagcacgaaggaggtgctcgacgccaccctgatccaccagagcatcaccgggctgtacgagacccgcatcgacctctcgcagctcggcggggac

SEQ ID NO: 112 - DNA, 4101 bp, Artificial sequence
  Synthetic Cas9
gacaagaagtacagtattggattggccatcgggacgaacagcgtgggctgggccgtcatcaccgacgagtacaaggtgccatccaagaagtttaaggttctggggaataccgaccgccactcgatcaagaaaaatctcatcggggcgctgcttttcgacagcggcgagacggcggaagcgacgcggctcaagcggacggctcgtcgccgttacacccggcgtaagaaccgcatctgttacctccaggagatattcagcaacgagatggcgaaggtggacgactcctttttccaccgtcttgaggagtccttcctggtcgaggaggacaagaagcacgagcgccacccgatcttcgggaacatcgtggacgaggtggcctaccacgagaagtaccccacgatctaccacctccgcaaaaaactcgtggactcaactgacaaggccgatttgaggcttatctacctcgccctcgcccacatgattaagttccgtgggcacttcctaatcgagggtgacctcaaccccgacaactctgacgtggacaagctgttcatccagcttgtgcagacctacaatcagctctttgaggagaatccgatcaacgcatctggtgtggacgcaaaggccatcctcagcgcgcggctgagcaagtctaggcggttggagaacctgatcgcccaactgcccggcgagaagaaaaatggcctcttcggcaacctgatcgccctgtcgctggggctcacgccgaacttcaagagtaactttgacctggcggaggacgctaagctccagctatctaaggacacatacgacgacgacctggacaacctgctggcccagatcggcgaccagtacgccgacctcttcctagccgccaagaacctgtccgacgccatcctcctcagcgacatcctgcgcgtgaacacggagatcacgaaggctccgctcagcgcctccatgattaagcggtacgacgagcaccaccaagacctaactttactcaaagccctcgtgcggcagcagcttcccgagaagtacaaagagatattttttgatcagtccaagaacggttatgcgggctacatcgacggcggcgcgagccaggaggagttctacaagttcatcaagcccatcctggagaagatggacggcacggaggagctgctcgtgaagctcaaccgtgaagacctcctgcgaaagcagcgaaccttcgacaacggttcgatcccgcaccagatccacctcggggagctgcacgccatcctgaggcgacaggaggacttctaccctttcctaaaggacaaccgcgagaagattgaaaaaatcctgacgtttcgcataccctactacgtcggcccgctggcgcgcggcaactcccggttcgcctggatgacccgtaagagcgaggagacgatcaccccgtggaacttcgaggaggtcgtggacaagggcgcgagcgcgcagagcttcatcgagcgcatgaccaacttcgacaagaacctcccgaacgagaaggtgctcccaaagcactccctcctgtacgagtatttcaccgtgtacaacgagttgacaaaggtgaagtacgtgacggagggaatgcggaagcctgcgttcctctcgggcgagcagaagaaggcaatcgtggacctgctcttcaagaccaaccggaaggtgacggtgaagcagctcaaggaggactacttcaaaaaaatcgagtgcttcgactccgtggagataagcggcgtggaggaccgattcaacgcctccctcggcacctaccacgacctccttaagatcatcaaggacaaggacttcctggacaacgaggagaacgaggacatcctggaggacatcgtgctcaccctgaccctcttcgaggaccgggagatgatcgaggagcgcctcaagacgtacgcccacttgttcgacgacaaggtgatgaagcagctcaagcggcggcgatacaccgggtggggccgcctatcccgcaaacttatcaacggcatccgcgacaagcagtccggcaagacgatcctggatttcctcaagtcggacgggttcgccaaccggaacttcatgcagctcatccacgacgacagcctcacgttcaaggaggacatccagaaggcccaagtgagcggtcaaggggacagcctccacgagcacattgcgaaccttgctgggagccctgcgatcaagaaggggatattgcaaaccgtgaaggtcgtggacgagttggtgaaggtcatggggcgacacaagcccgagaacatcgtgatcgagatggccagggaaaatcagaccacgcagaagggccaaaaaaacagccgcgagcggatgaagcggatcgaggagggcatcaaggagctggggtcgcagatcctcaaggagcacccggtggagaacacgcagctccagaacgagaagctgtacctctattacctacagaacgggcgggatatgtacgtggaccaggagctagacatcaaccgcctgtccgactacgacgtggaccatatcgtcccgcagtcgttcttgaaggacgacagcatcgacaacaaggtgctcacaagatcggataagaatcgaggcaagtccgacaacgtgccctcggaggaggtggtcaagaaaatgaaaaactactggcggcagttgctgaacgccaagctcattacgcagcggaagttcgacaacctgacgaaggctgaacgtggtgggctcagcgagctagacaaggcggggttcatcaagcggcagctcgtcgagacccggcagatcaccaagcacgtggcgcagatcctggactcgcgcatgaacaccaagtacgacgagaacgacaagctcatccgtgaggtgaaggtcatcacccttaagtctaagctggtcagtgacttccgcaaggacttccagttctacaaggtccgggagatcaacaactaccaccacgcgcacgacgcctacctcaacgcggtggtggggacggcgcttattaagaaatatcccaagctggaaagcgagttcgtttacggcgactacaaggtgtacgacgtccgcaagatgatcgcaaagtcggaacaggaaatcggaaaggcgacggccaaatatttcttttactccaacatcatgaatttttttaagacggagatcaccctggcgaacggggagatccgcaagcggcccctcatcgagaccaacggggagacgggcgagatcgtctgggacaagggccgggacttcgccaccgtgcggaaggtgctttctatgcctcaagtcaatatcgtcaaaaagacagaggtgcagaccggcgggttcagcaaggagtctatcctgccgaagcgcaactcggacaagctcatcgcgcgcaagaaagactgggaccccaaaaaatatggcgggttcgactcgccgaccgtcgcctacagcgtcctcgtggtggctaaggtcgagaagggcaagagcaaaaagctaaagtcggtgaaggagctgctgggcatcaccatcatggagcgctcgtctttcgagaagaatccaatcgacttcctagaggcgaaggggtacaaggaggtcaaaaaggatcttatcatcaaactgccgaagtacagtctgttcgagctggagaacgggcggaagcggatgctggctagtgcgggcgagttgcagaagggcaacgagttggcactgccctccaagtacgtgaacttcctgtacctggcctcccactacgagaagctcaaggggagccccgaggacaacgagcagaagcagctattcgtcgagcagcacaagcactacctggacgagatcatcgagcagatcagtgagttctccaagcgggtcatcctcgcggacgccaacctggacaaggtgctgagcgcgtacaacaagcacagggacaagccaatcagggaacaggccgagaacatcatccacctgttcaccctgaccaacctgggtgcaccggctgccttcaagtactttgacacgaccatcgaccggaagcgctacacctccacgaaggaggtgctggacgccacgctgatccaccagagcatcaccgggctctacgagacacggatcgacctgagccagcttggcggggac

SEQ ID NO: 113 - DNA, 4092 bp, Artificial sequence
  Synthetic Cas9
gacaaaaagtattccattggactcgctatcggcacgaacagcgtcgggtgggcggtcatcactgacgagtacaaggtgccgagcaagaagtttaaggtgctgggaaacaccgacaggcactcgatcaagaaaaatcttatcggggccctactcttcgactccggagaaaccgccgaggccacccggttgaagcgcacggcccgccgtcgctacaccaggcgcaagaaccggatctgctacctccaggagatattcagcaatgagatggcgaaggtggacgactcgttttttcacaggctagaggagtctttcctcgtggaggaggacaagaaacacgagcgccaccccatcttcggcaacatcgtggatgaggtggcatatcacgagaagtacccaaccatctaccacctccgcaaaaagctcgtggactctaccgacaaggccgacctccgtctgatctacctcgcgctggcccacatgattaagttccgaggacactttctgatcgagggcgacctgaacccagacaacagcgacgtggacaagctgttcatccaacttgtccagacctacaatcagctcttcgaggagaaccctatcaacgcctcgggcgtggacgcgaaggccatcctgtccgcccgcctgagcaagtcgcggcggctggagaacctgatcgcccagctccccggcgaaaaaaagaacggcctcttcggcaacctcatcgcgttgtcgctggggctcaccccgaacttcaagtccaacttcgacctggccgaggacgctaaactccagctctcgaaggatacctacgacgacgacctcgacaacctgctggcccagatcggcgaccagtacgcggaccttttcctggcggccaagaacctgagcgacgcgatcctccttagcgacatactccgtgtgaacaccgagatcacgaaggccccgctctccgcgtccatgattaagcgctacgacgagcaccaccaagaccttaccctgcttaaggcgctggtcaggcagcagttaccggagaagtacaaggagatcttttttgatcaatctaagaacggttacgccgggtacatcgacggcggcgcgtcccaggaggagttctacaagttcatcaagccgatcttggagaaaatggacgggaccgaggagctgctcgtgaagctcaaccgcgaagacctcctccgcaagcagcgcaccttcgacaacgggagcatcccgcaccagatccacctgggagagctgcacgcgatcctgcggagacaagaggacttctaccccttcctcaaggacaaccgggagaagattgaaaaaatacttacttttcgtatcccgtactacgtcgggccccttgcgaggggcaactccagattcgcgtggatgacccgcaagtccgaggagaccatcaccccgtggaacttcgaggaggtggtggacaagggcgcgtcggcccagtcgttcatcgagcgcatgaccaacttcgacaagaaccttccgaacgagaaggtgctcccgaagcacagcctgctctacgaatattttactgtgtacaacgagctgacgaaggtcaagtacgttacggaggggatgaggaagcccgccttcctctccggcgagcagaagaaagccattgtggatctcctgttcaagaccaaccgcaaggtgacggtgaaacagctcaaagaggactacttcaagaagatcgagtgcttcgactccgtagagatcagcggggtcgaggaccgcttcaacgcctcgctgggcacgtaccacgacctgctaaagattatcaaggacaaagacttcctagacaatgaggagaacgaggacattctggaggacatcgtgctgactctgacgctgttcgaagaccgcgagatgatcgaggagcggcttaagacgtacgcccacctgttcgacgacaaggtgatgaagcagttgaaacggcggcgctacaccgggtggggccgcctctcccgcaagctcatcaacggcatccgcgacaagcagtcggggaagacgatcctggacttcctcaagagcgacggcttcgccaaccgaaacttcatgcagctaatccacgacgacagcctgacgttcaaggaggacatccagaaggcccaagtgagcggccagggagactcgctacacgagcatatcgccaacctggctggcagcccggcgattaagaaaggaatcctccaaaccgtcaaagtggtggacgagctggtgaaggtgatgggccgccacaagcccgagaacattgtgatcgagatggcgcgggagaaccagacgacgcagaagggccaaaaaaatagcagggaaaggatgaagcgaatagaggaggggatcaaggagctggggagccagattctcaaagagcacccggtcgagaacacacagctccagaacgagaagctgtacctctactacctccaaaacggccgcgatatgtacgtggaccaggaactagacatcaaccggctgagcgactatgacgtggaccacatcgtgccgcagtccttcctcaaggacgactcgattgacaacaaagtgctcactagatccgacaagaacagaggcaagagcgataacgtcccgtcggaggaggtcgtcaagaaaatgaaaaactactggcggcagctcctaaacgccaagctcatcacgcagcgtaagttcgacaacctgacgaaggcggagcggggcgggctgagcgagctggacaaagcggggttcatcaagcggcagctcgttgagacgcggcagatcacaaagcacgtcgcgcaaatcctcgactcccgcatgaacaccaagtacgacgagaacgacaagctcatccgggaggtgaaggtcattacccttaaatcgaagctcgtcagcgactttcgtaaggacttccagttctacaaggtcagagagatcaacaactaccaccacgcccacgacgcctatctgaacgccgtggtgggcaccgcgcttattaagaagtaccccaagctggagtccgagttcgtgtacggcgactacaaggtttatgacgtcaggaagatgatcgccaagtcggaacaggagatcggaaaagctaccgccaaatatttcttctatagcaacatcatgaacttcttcaaaaccgagatcaccctcgccaacggcgagatccggaagcgcccgctcatcgagaccaacggggagaccggggagatcgtctgggacaaggggcgggacttcgctactgtccgaaaggtgctctccatgccacaagtgaatatcgtcaagaaaacagaggtgcagaccggagggttcagtaaggagtccatcctgcccaagcggaactccgacaagctaattgctcgcaaaaaggattgggatcctaaaaaatatggcggcttcgactcgcccacggtcgcctactctgtgctggtcgtggcgaaggtggagaagggcaagtccaagaagctcaagagcgtcaaggagctgctggggatcacgatcatggagcgtagttcgtttgagaagaatcccatcgacttcctggaggctaagggctacaaggaggtcaaaaaggacctcatcattaagctgccgaagtacagcctcttcgagctggagaacgggcggaagcgtatgctcgcctccgctggggagttacaaaaggggaacgagctggcgctgccgtctaagtacgtcaacttcctgtacctggcctcccactacgagaagctcaaggggtcgccggaggacaacgagcagaagcagctcttcgtagagcagcacaagcactacctggacgagatcatcgagcagatttcagagttctcaaagcgggtcatcctcgccgacgccaacctggacaaggtgctctcggcctacaacaagcaccgggacaagccgatccgcgaacaggccgaaaacatcatccacctgttcacgctcaccaacctcggtgccccggcggccttcaagtactttgacacgaccatcgaccggaagcgctatacctcgacgaaggaggtgctggacgccaccctgatccaccagtccatcaccgggctttacgagacccggatcgacctctcgcagcta

SEQ ID NO: 114 - DNA, 4101 bp, Artificial sequence
  Synthetic Cas9
gacaagaagtatagtattggactcgccatcggaaccaactctgtggggtgggctgttattacagatgaatataaggtgccatccaaaaagtttaaagttctgggcaatactgatagacactcaatcaagaagaatctgataggtgcacttctgtttgatagtggagagactgccgaggcaaccagacttaaaaggactgcaagaagaagatataccagaagaaagaataggatttgctatttgcaggaaatcttcagcaacgaaatggccaaggttgatgactcatttttccataggttggaggagagttttcttgtggaggaagataagaagcacgaaagacacccaattttcgggaatatagtggacgaggtggcttatcatgagaagtatcccactatctaccacctgagaaagaaacttgtggactcaaccgataaggctgatcttaggcttatatacttggcccttgcacatatgatcaaattcaggggccattttcttatcgaaggcgatcttaatcccgataactcagatgtggacaagctgtttatacaacttgtgcaaacctacaatcaactcttcgaggagaatcccattaacgcctccggcgtggatgcaaaagccatactgtcagccagactgagcaaaagtaggagactggagaatcttatagcccaactgcccggtgaaaagaagaatgggctcttcggaaatctgatcgctctttcattggggttgacacccaactttaagagtaactttgacttggcagaagatgcaaagttgcagctcagtaaagacacatatgacgatgaccttgacaatctcttggcacaaataggggatcaatacgctgaccttttcctcgctgccaagaacctcagcgacgctatactgttgtccgacattcttagggttaataccgaaattacaaaggcccctcttagtgcaagtatgatcaaaaggtatgatgagcatcaccaagaccttacactgctgaaggctctggttagacagcaactccctgaaaagtataaggaaatattcttcgaccaaagtaagaacgggtacgccggttatattgatgggggcgcaagtcaagaagaattttacaaattcatcaagccaattcttgaaaagatggacgggactgaggaattgctggtgaaactgaatagagaggaccttcttagaaaacagaggacatttgacaatgggtccatcccacaccagattcatctgggggaactccacgcaatattgaggagacaagaagacttttacccattccttaaggataatagagagaaaatcgaaaaaatcctgactttcaggattccttactatgttgggccactggccagggggaactcaagattcgcttggatgacaaggaagtcagaagaaaccataaccccttggaattttgaagaggtggttgataagggggcatcagcccagtctttcatagagaggatgaccaactttgataaaaatcttccaaatgagaaggttttgccaaaacatagtcttttgtacgagtactttactgtttataacgaattgaccaaggtgaagtatgtgaccgagggaatgaggaagccagcatttttgtccggggagcaaaagaaagcaatcgttgatcttctcttcaagaccaacagaaaagtgaccgtgaaacaactgaaggaagactacttcaaaaagatagaatgtttcgattcagtggaaattagcggtgttgaagacaggttcaatgcttcattgggtacttaccacgacctgttgaagataatcaaagacaaggactttctcgataatgaggagaacgaagacatcttggaagacattgtgcttacactcactttgtttgaggacagggaaatgattgaggaaagactcaaaacttacgctcatttgtttgatgataaggttatgaaacaactaaaaagaagaaggtacaccggctggggaagattgagtaggaaactgatcaacggtattagagataaacaatccggaaagactatcctcgatttccttaagagtgatggctttgcaaataggaattttatgcagctgattcatgacgactcacttaccttcaaagaagacatccaaaaagctcaggtgtctgggcaaggcgacagtctgcatgaacatatagctaacttggctgggagtcccgccatcaagaaggggatacttcaaacagttaaagttgtggacgaattggtgaaggtaatgggaaggcacaagcctgaaaatatagtgatagaaatggcaagggaaaatcaaacaacccagaagggacagaagaacagtagggaaaggatgaaaaggatagaagaggggatcaaagagcttggtagccagatcctcaaggaacatccagtggagaatacccaacttcaaaacgagaaactctatttgtactacttgcagaacggaagagatatgtatgtggaccaagagcttgatattaacaggctgagcgattatgacgttgaccacatagtgccccaatcattcctcaaggatgactctattgataataaggtgctgacaaggagtgacaagaatagagggaaatccgacaacgttccatccgaggaagttgtgaagaagatgaagaactactggaggcagttgctgaacgctaagctcattacccagaggaaattcgataacctgaccaaagcagagagaggcgggctgagcgaactcgataaagcaggtttcatcaagagacaactcgtggagactaggcaaattactaagcacgtggctcaaatactcgacagcaggatgaacacaaagtacgacgagaacgacaagctcattagagaggttaaggttattactctgaaaagtaaattggttagcgatttcagaaaggatttccaattctataaggttagagagatcaacaattatcatcatgcacatgatgcctatctgaatgctgtggttggtacagcccttatcaagaagtaccctaagctagagagcgagtttgtgtacggagattataaggtgtatgatgtgaggaaaatgatcgctaaaagtgagcaagagattggaaaggctaccgccaaatacttcttttattccaatattatgaatttcttcaagacagaaatcaccctggctaacggcgagataaggaagaggccgcttatcgaaactaatggggagacaggcgaaatagtgtgggacaaagggagggatttcgcaactgtgaggaaggttttgagcatgcctcaggtgaatatcgttaagaaaaccgaagttcaaactggagggttctctaaggaaagcattctccccaagaggaactccgacaagctgattgctagaaagaaagactgggaccccaagaagtatggcggattcgactcacccactgtggcatatagcgttctcgtggtggcaaaggttgaaaagggtaaatccaaaaaactcaaatccgtgaaggaactccttggcataactattatggaaaggagtagctttgaaaagaatcccatcgactttctcgaagctaagggctataaggaagttaagaaggaccttataatcaaacttccaaaatactccctttttgagttggaaaacggcagaaagagaatgttggccagtgccggggagcttcaaaagggcaacgaactggctctgcctagcaaatatgtgaactttttgtatctggcatcacactacgagaaacttaaaggctctcctgaggacaacgagcaaaaacagctctttgttgaacagcataagcactacctcgacgagattattgagcagatcagcgagttctcaaagagagttattctggctgacgctaatcttgacaaggttttgtccgcttacaacaaacacagggataagccaatcagggagcaggcagaaaacataatccatctctttaccctgacaaacctcggtgcccccgctgctttcaagtattttgatactaccattgacaggaagagatatacttccactaaggaagtgctcgacgcaaccctcatacaccaaagtatcacaggcctctatgaaactaggatagatttgtctcaacttgggggcgat

SEQ ID NO: 115 - DNA, 4101 bp, Artificial sequence
  Synthetic Cas9
gacaaaaagtattccatcgggcttgctatcggaaccaactctgtggggtgggcagttattaccgacgaatacaaggtgcccagcaagaagtttaaggttctggggaacacagatagacatagcataaagaaaaacctgataggcgcactgttgttcgactccggggaaacagccgaagctaccaggctgaagagaactgcaagaagaaggtacaccagaagaaaaaacagaatatgttatctccaagagattttctctaacgagatggccaaggtggacgactcattctttcacagactggaagaatctttccttgtggaagaagataagaaacacgagaggcaccctatttttggcaatatcgtggatgaggtggcttaccacgaaaaataccctacaatataccacctcaggaaaaaattggttgatagtacagacaaggccgacctcaggctcatctatttggccctggcccatatgattaaattcagggggcactttctcatcgagggagatttgaaccccgacaacagtgatgttgataagctctttattcagctcgtgcagacttacaatcagttgtttgaggaaaaccccattaatgcttccggggtggacgccaaggcaatcctttctgcaagactctcaaagtcaaggagactcgaaaatctgatagcacagcttccaggagagaagaagaacgggctctttggaaacctgatcgctctgtcactcggactcacacccaatttcaaaagcaattttgatttggcagaggacgctaagctgcaactcagtaaggatacctacgacgatgacttggataatctgctcgcacaaattggggaccagtatgcagacctgtttctcgcagctaagaacttgagtgacgccatattgctcagtgacatcctcagggttaataccgagattacaaaagctccactctctgcaagcatgatcaagaggtatgacgagcaccatcaagacctgacactccttaaggcgttggttaggcagcaacttcctgaaaagtataaggaaatcttcttcgatcaaagcaaaaacggctacgccggctatatagacgggggagcatcccaagaagaattttataagttcataaaacctatattggagaagatggacgggacagaggaattgctcgtgaaactgaacagggaggatctcctcaggaagcaaaggaccttcgacaatggctccatcccacatcagattcacctcggcgaactgcacgcaatactgagaagacaagaggacttttatcctttcctgaaggacaacagggagaaaatcgagaaaatcttgacattcagaatcccatactacgttgggcctctggccagaggtaacagtaggttcgcctggatgactaggaaatcagaggagactattacaccctggaactttgaagaagttgttgataagggagcttcagcacaatcattcatcgaaagaatgacaaactttgacaaaaatctgcctaatgagaaagtgctcccaaaacattccctgctgtatgagtattttaccgtttataacgagcttaccaaggtgaaatacgttactgaaggtatgagaaagccagcttttctttcaggggagcaaaagaaggctatcgtggatcttctctttaagaccaacagaaaggttaccgtgaagcagcttaaggaagactactttaaaaagatcgagtgttttgactcagtggaaataagcggtgttgaagatagattcaacgcatccttgggaacttatcatgatcttcttaagataatcaaggataaagactttctcgacaacgaggaaaacgaagatatactggaggacatagttctgacacttactttgttcgaggatagggagatgatcgaggaaagactgaaaacatatgctcaccttttcgacgacaaagttatgaaacaactcaagagaaggagatatacagggtgggggagattgagcaggaaactgattaatggtatcagagacaaacagtcaggaaaaacaatactcgactttttgaaatcagacgggttcgcaaataggaatttcatgcagcttatacacgacgattcacttacttttaaagaggacattcaaaaggctcaagttagtggacaaggtgactccctccacgaacacatcgcaaatctcgctggcagccctgcaattaagaagggtatactccagacagttaaggttgttgacgagctggttaaagtgatgggaagacacaaacccgagaacatagtgatagagatggccagggaaaaccaaaccactcaaaaagggcagaaaaattccagagagaggatgaaaaggattgaagaaggtatcaaggagctgggtagccaaattctgaaagaacatcctgtggaaaacactcaactccagaatgagaaactctatctgtactatctgcaaaatgggagagatatgtatgtggaccaggaactggacataaacaggctctcagattacgatgtggatcatatcgtgccacagtcctttcttaaggatgatagcatcgacaataaggtgcttaccaggtccgacaagaacaggggaaagtcagataacgtgccttctgaagaagttgttaaaaagatgaagaactactggagacagctgcttaacgctaagctcataacacagaggaagtttgacaacttgaccaaggccgagagaggcggactctcagaattggataaggcagggttcataaaaaggcagctggtggaaacaaggcagataactaaacatgtggctcagatcctcgatagtaggatgaatacaaaatacgatgagaacgacaagctcataagggaggttaaagtgataactctgaaatccaaactggttagcgattttaggaaggatttccagttttacaaagttagggagatcaacaattatcatcacgcccacgatgcctacttgaacgcagttgtgggtactgcacttatcaaaaagtaccctaagctggaatccgagtttgtttatggagactataaggtgtacgacgttagaaaaatgattgcaaagtcagagcaggagatagggaaagccactgcaaaatatttcttttatagcaatatcatgaatttctttaagacagaaatcacactggccaatggggaaataaggaagaggcccctgatcgaaactaatggcgagacaggggagattgtgtgggataaaggtagggactttgcaacagtgaggaaagtgctgagcatgccccaagttaatatcgttaaaaagaccgaggttcaaacagggggctttagtaaggaaagcattttgcccaagaggaatagtgacaaattgattgctaggaaaaaagattgggaccccaaaaagtatggcggatttgatagccccactgttgcttactccgtgctcgtggttgcaaaggtggagaagggaaagagcaagaaactgaagtcagttaaggaactccttggtatcactatcatggaaagaagctcctttgagaagaaccctattgacttcctggaggctaaagggtacaaagaggttaagaaagaccttatcattaaattgcccaaatatagtcttttcgagcttgaaaacggaagaaagaggatgcttgcatccgctggcgaattgcaaaagggcaatgagcttgctctcccttccaagtatgtgaacttcctttatcttgcctcacactatgaaaaactcaaaggttcacccgaagacaacgaacaaaagcaactatttgtggaacaacacaagcactacctggacgaaatcattgagcaaatttctgagttttcaaaaagggtaatcttggctgacgcaaatctcgacaaagttttgtcagcttacaacaaacatagagataagccaattagagagcaagctgagaatatcatccatctgtttaccctgactaaccttggagcgcctgctgcttttaaatatttcgacaccacaatcgacaggaagaggtacactagcactaaggaagttctcgacgccaccctcatccaccagagtattacaggcctgtacgagacaagaattgatctttctcaacttggtggtgac

SEQ ID NO: 116 - DNA, 4101 bp, Artificial sequence
  Synthetic Cas9
gataagaagtactcaatcggtctggcaatcggaaccaactctgtgggttgggcagtgattacagatgagtataaggtgccaagcaaaaaattcaaggtgctgggtaataccgacagacacagcattaagaagaatttgattggagcactcctctttgactcaggggaaacagcagaggcaacaaggctgaagaggacagcaaggcggaggtacacaaggcggaaaaacaggatatgctacctccaggaaatctttagcaacgagatggctaaagtggatgatagctttttccatagactcgaagaatcctttcttgttgaagaggacaaaaagcatgaaaggcatcccatcttcggcaatatagttgatgaggttgcataccatgagaagtaccccacaatctaccacctcagaaagaaacttgtggactccacagataaagcagacctgaggctcatatacctcgcactcgcacacatgatcaagttcagagggcactttctcatcgaaggtgacctgaatccagataattcagatgtggataaactgtttatacagctggtgcaaacatacaaccaacttttcgaggaaaacccaatcaatgcctccggtgttgatgcaaaggccatcctgtcagcaagactcagcaaaagcaggcggctcgaaaacctcatcgcccagcttcccggtgaaaagaagaacgggctctttggtaatctcatcgcattgagccttggtcttactccaaacttcaagagcaattttgatctggcagaggatgctaaactgcaactctcaaaggacacatatgacgatgaccttgacaatctgttggcccagatcggggaccaatatgcagacctcttcctggccgcaaagaatctgtcagatgcaatcctcttgtccgacatactgagagttaacactgagatcacaaaggcacctctgtccgcctccatgattaagagatacgatgagcatcaccaggatctgactttgctcaaagccctcgttagacagcagttgccagaaaagtacaaagaaatattctttgatcaatcaaaaaacggatatgcagggtacatcgacggtggggcaagccaggaagagttctacaaattcatcaaacctatcctggaaaagatggatgggacagaagagctgctggttaagctgaatagggaagacctcctcagaaagcagaggacatttgataacgggagcatccctcatcaaatccacctcggtgaactccatgctatcctgagaaggcaggaagacttttatccatttttgaaggacaatagggagaaaatcgaaaaaatcctgacattcagaatcccatactacgttggtcctctggcaagaggtaacagtaggttcgcatggatgacaaggaaaagcgaggagacaatcacaccctggaattttgaggaagttgttgacaagggtgccagcgcacaatcctttatcgaaagaatgacaaatttcgacaagaatctgcctaacgaaaaggttctcccaaagcattcactcctgtacgaatattttacagtttataacgaactgactaaagttaaatacgttaccgagggtatgaggaagccagcattcctttccggggaacagaagaaagctattgtggacctcctgttcaagacaaatagaaaagtgacagttaagcaactcaaagaggattacttcaaaaagatcgaatgttttgactctgtggagatcagcggggtggaggatagattcaacgccagcctgggtacatatcatgatctcctgaaaatcattaaagacaaggacttccttgacaacgaggagaacgaggacattctggaagacattgttctgaccctcacactctttgaggatagggagatgattgaggaaagactgaagacctacgcccacctctttgacgataaagtgatgaaacagctcaagagaagaaggtatacaggttgggggagactgagcaggaagttgatcaatgggattagggacaaacagtccgggaaaacaatcctcgattttctgaagtcagacggtttcgcaaacagaaattttatgcagctcattcacgatgacagcttgacattcaaggaagacatccaaaaggctcaagtgagcggccaaggggatagcctccacgagcatattgcaaatctggcaggttcaccagccatcaaaaagggcatacttcagacagttaaggttgtggacgaattggttaaagttatgggcaggcataagccagagaatatcgttatcgaaatggcaagggagaaccaaacaactcaaaaagggcagaaaaatagcagagagaggatgaaaagaatcgaggaagggatcaaggaacttgggtcccaaatcctcaaggagcacccagttgaaaatactcaactgcaaaacgagaagctctatctctactatctccaaaacgggagggatatgtatgttgaccaggagctggatattaacagactgtcagattatgatgttgatcatatcgtgccccagtcattcctgaaggacgattccatcgacaacaaagttctcacaaggtccgataaaaacaggggcaagtccgataacgttccaagcgaagaagtggtgaaaaagatgaaaaactattggagacaacttctgaatgcaaagttgattactcagagaaagtttgacaacctcacaaaagcagaaagaggcgggcttagcgaactcgataaggcagggtttatcaaaagacagctggttgagacaaggcagatcacaaaacatgtggcacagatccttgactcaaggatgaataccaagtatgatgagaatgataagttgatcagggaggttaaagttatcacactcaaatccaaactggtgtcagacttcaggaaagactttcaattttataaggtgagggagatcaataactaccaccatgcacatgacgcctacctgaacgcagtggtgggtacagcattgattaaaaaataccctaagctggagtctgagtttgtgtacggggactacaaggtgtacgacgtgaggaaaatgatagccaagtccgagcaggagatcgggaaagcaacagctaagtatttcttttacagtaatatcatgaatttctttaaaactgagattactctggcaaacggggagatcaggaaaagacccctcatcgagactaatggtgaaacaggtgagatcgtttgggacaaggggagggattttgctactgttagaaaagttctgagtatgccacaagtgaatattgtgaaaaagacagaagttcagacaggtgggttctccaaagaatccatcctgcccaagagaaattcagacaagctcatcgcaagaaagaaggactgggaccctaagaagtacggaggatttgacagccccaccgtggcctattccgtgcttgttgtggcaaaggtggagaaagggaagagcaaaaaactgaaatccgtgaaagaactgctgggaattaccatcatggaaagaagctcctttgagaagaacccaatcgacttcctggaagcaaaaggatataaggaagtgaaaaaggacctcattatcaagctcccaaaatactcacttttcgagttggagaacggtagaaagaggatgctggcaagcgcaggggaacttcagaaaggcaatgagctggcattgccatcaaagtatgtgaacttcctctacttggccagccattacgagaaacttaaaggtagcccagaagataacgagcaaaaacagctctttgtggaacagcataagcattatctggatgagatcatagaacaaatctcagagttttccaagagagttatcctcgcagatgcaaacctggataaggttctctcagcctataataagcatagagacaagccaattagagagcaagcagagaacattatccacttgttcactcttacaaacctgggggcaccagccgccttcaaatatttcgatacaacaatagacagaaagaggtataccagcaccaaagaagttctcgacgccacactgatccatcaatcaatcacaggcctttacgaaactaggatcgacttgtcacaactgggtggggat

SEQ ID NO: 117 - DNA, 3307 bp, Artificial sequence
  Synthetic Cas9
gagcaaggacacctacgacgacgacttggacaacctattggcccagataggtgaccagtatgcagacctcttccttgcggccaagaacttgagtgacgctatactgctcagtgacatcctgagggtgaacactgagatcactaaggcccctctctctgcctcaatgattaagcgttacgacgagcatcaccaggatctcaccctgcttaaggcccttgttcggcagcagctccctgagaagtacaaggagatattttttgaccagtctaagaacggctacgccggttacattgacggtggggcaagccaggaggagttctacaagttcatcaagccgatccttgagaagatggacggcaccgaggagctacttgtcaagttgaaccgggaagacctgctccggaaacagcgtacattcgacaacggcagcatccctcaccagatccacctgggcgaactacacgccatcctccgacgtcaggaggacttctatccattcttgaaagataacagggaaaaaatcgaaaaaatacttacgtttcgaataccttactacgtggggccccttgctcggggaaactccagattcgcatggatgaccaggaagtcagaggagaccatcacaccctggaactttgaggaggtggttgacaaaggtgcttctgcccagtccttcattgagcggatgactaacttcgacaagaacctgcccaacgagaaggtgctgccaaagcacagcctgctctacgaatactttactgtgtacaatgagctgacgaaggtgaagtacgtgacagaggggatgcggaagcccgctttcctgagcggcgagcaaaaaaaagcaatcgtggacctactgttcaagaccaaccgaaaggtgacagtgaagcagctcaaggaggactacttcaaaaaaatcgagtgcttcgactctgttgagataagcggcgtggaggaccgattcaacgcctcattgggaacctatcacgacctgctcaagatcattaaggacaaggacttcctggataatgaggagaatgaggacatcctggaggatattgtgctgacccttactctattcgaggacagggagatgatcgaggagcgactcaagacctacgctcacctgttcgacgacaaggttatgaagcaattgaagcgtaggcgatacacggggtggggaagactctcccgaaaactgataaacggcatcagggacaagcagtcagggaagacgatcttggacttcctgaaatccgacgggttcgccaaccgcaacttcatgcagctcattcacgacgactcactaacgttcaaagaggacattcagaaggctcaagtcagtggacaaggcgactccctgcacgagcacattgcaaaccttgcgggctccccggcgattaaaaagggcattctccaaacggttaaggtggtggacgagctggtgaaggtgatgggccgacacaagcctgagaacatcgtgatcgagatggccagggagaaccagactacccagaagggtcagaagaactctcgggaacgtatgaagcgtattgaggaggggattaaggagttgggctctcaaatcctcaaggagcaccctgtggagaacactcagctccaaaacgagaagctgtacctgtactacctgcaaaacgggcgcgatatgtacgtggatcaggagttggacatcaacaggcttagcgattacgacgtggaccacatcgtgccacagtcattcttaaaggacgacagcatcgacaacaaggttctgacgaggagcgacaagaatcgagggaaaagtgacaatgttccatccgaggaggtggtcaagaaaatgaagaactattggcgtcagcttctgaacgccaagctcatcacccagcggaaattcgacaacctgactaaggctgagcgaggcggactctccgagcttgacaaggctggcttcatcaagcggcagttggtcgaaacccgacagataacgaagcacgttgcccagatacttgactcccgtatgaacaccaagtacgacgagaacgacaagctcatcagggaggtgaaggtcattacccttaagtccaaactcgtcagcgactttcgtaaggacttccagttctacaaggtgcgcgagatcaataactaccaccacgcacacgacgcctacctgaacgcagtggttggaaccgcgttgattaaaaagtaccccaagttggagtcggagttcgtttacggggactacaaggtgtacgacgttcggaagatgatcgccaagtctgaacaggagatcgggaaagcaaccgccaagtatttcttctatagcaacatcatgaacttctttaaaaccgagatcacacttgccaatggcgagatccgtaagaggccgctgatcgagacaaatggggagactggcgagatcgtgtgggacaagggccgcgacttcgcaaccgttcggaaagtcttgtccatgcctcaagtcaacatcgtcaagaagactgaggtgcaaacaggcgggttctcgaaggagtccatactgcccaagaggaactcagacaagctcatagcacgcaaaaaagactgggatccaaagaaatacggcgggttcgactcgccgacagtcgcatactccgtgttagtggtggctaaagtggaaaaggggaagtccaagaagctcaagtccgtcaaggagttgctcgggatcaccattatggaacggtcctcattcgagaagaatcccattgacttcctagaggcgaagggctacaaagaggtcaaaaaggacctaattattaagctccccaagtattcactcttcgaacttgaaaatggtcgtaagcggatgttggcaagcgctggagagcttcagaaggggaacgagcttgcactgccttccaagtacgtgaacttcctgtacctcgcctctcattacgagaagttgaagggctcaccggaggacaacgagcagaagcagttgttcgtggagcagcacaagcactacctcgacgagatcattgagcagataagtgagttcagcaaacgggtgatccttgccgacgctaacctggacaaggtgctgagcgcctacaacaagcacagagacaagccgatccgagagcaagcggagaacatcatacacctgttcaccctcacgaacctcggggctcccgcagccttcaaatattttgacacgaccatcgaccgtaaacgctacactagcacgaaggaggtgctggacgctacccttatccaccagtccatcaccggcctgtacgagacgagaatcgacttgtcgcagctcggtggtgac

SEQ ID NO: 118 - DNA, 4101 bp, Artificial sequence
  Synthetic Cas9
gacaaaaaatactcaattggtctggcaattgggaccaacagtgtcggatgggccgtgattaccgacgagtacaaggtgccgtccaaaaaattcaaggtgcttgggaacaccgaccgccactcgatcaagaaaaacctaatcggtgcgttgcttttcgacagtggggagaccgccgaggcaacacgcttaaaacgcacagctaggaggagatatacacggcgcaagaaccgaatatgctacttacaggagatattctccaatgagatggcgaaggtggacgactctttcttccatcggcttgaggaatccttcctggtcgaggaggacaagaagcacgagcgacacccgatattcgggaacatcgttgatgaggtggcgtaccacgagaagtacccaacgatataccacttacgcaagaagctcgtggactctacggacaaggccgacttgcgccttatctacttggcactggcccacatgattaagttccgaggccacttccttatcgagggtgacctgaaccccgataactccgacgtggacaagctcttcatccaactcgtccagacatacaaccagctattcgaggagaatcctatcaacgcctctggggtggacgctaaagctatcctctcagcccgcctgtcaaagtcgaggaggttggagaacctaatcgcccagcttccaggcgagaagaaaaatgggctgttcggaaaccttatcgcactctcactgggcctaaccccgaacttcaagtccaacttcgacctggcagaggacgcgaaattgcagttgtcgaaagacacctatgacgatgacctggacaacctgttggcccagataggggaccagtacgccgacctgttcctagcggccaagaacctgtccgacgccatcttgctgtcggatatactgcgggtgaacaccgagatcactaaagcacctctctccgccagcatgattaagcgttacgacgagcaccaccaagatttgaccctgctaaaggcacttgtacggcagcagcttcccgagaagtacaaggagatctttttcgaccaaagcaagaacggctacgccgggtacatcgacggaggtgccagccaggaggagttctacaagttcattaagcccatcctggagaagatggacgggactgaggaactacttgtgaagctgaaccgggaagacttactacggaagcagcgtaccttcgacaacggttctatcccacatcagatccatcttggggagttgcacgcgatcctgcgacgccaggaggacttttaccccttcctgaaagacaaccgcgagaaaatcgagaagatactgaccttcagaataccttactacgtcggaccccttgcgcgaggcaactcaagattcgcgtggatgaccaggaaatcagaggagaccatcacaccctggaatttcgaggaggtggttgacaagggtgcctccgcccagtcctttatcgaacgaatgaccaacttcgacaagaacttgcccaacgagaaggtgctccccaaacacagcctcctctacgaatatttcacagtgtacaacgagcttactaaagttaagtatgttactgagggcatgaggaaacccgccttcctgtcaggcgagcagaagaaagctattgtggacctccttttcaagaccaaccggaaggtgacagtgaagcagctcaaggaggactacttcaagaagatagagtgcttcgacagcgtggagatcagcggggtggaggacagattcaatgcctctctcggaacataccacgacttgcttaagatcatcaaggacaaggacttcctcgacaacgaggaaaacgaggatattctggaggatattgttctgactcttaccctgttcgaggaccgggagatgatcgaggagcgtctcaagacctacgcccacctgttcgacgacaaagttatgaagcagctcaagcgtcggagatataccggatggggccgtctgtctcggaagctcatcaacgggatcagggacaagcagtcagggaagacgatcttagacttccttaagtctgacggcttcgccaacaggaacttcatgcagttgatccacgacgacagccttaccttcaaggaggacatccagaaggcccaagtgagtggccagggtgacagcctccacgagcatattgctaatcttgcgggttccccagcgattaaaaagggcatacttcaaaccgttaaggtggtggacgagcttgtcaaggtgatggggcgacacaagcccgagaacatcgtgatcgagatggccagggagaaccagaccacccagaaggggcagaagaatagccgagaacgcatgaagcgcatcgaggaggggattaaggagctagggagccagatcctcaaggaacatcccgtcgagaacacccagctccagaacgagaagctatacctctactacttgcaaaacgggagggatatgtacgtggatcaggagttggacattaaccgcctaagcgactacgacgtagatcacatcgtgcctcagtcattcctcaaagacgacagcattgacaacaaagtcttgacccgatccgacaagaaccgaggaaaatccgacaatgtgccctcagaggaggtcgtcaagaaaatgaagaactattggaggcagctacttaacgccaaactcataacccagcggaagttcgacaacctgacaaaggctgagcggggtgggctcagcgagcttgacaaggctggcttcatcaagcggcagttggtggagacaagacagataacgaagcacgtggctcagatcctggactctcgcatgaacacgaagtacgacgagaacgacaaattgatccgcgaggtcaaggttattacgctcaagagcaaacttgtcagcgatttccgcaaggacttccagttctacaaggtgagggagattaacaactaccaccatgcacatgatgcctacttgaacgcagtggtggggaccgcgcttattaaaaagtaccctaagttggagtcagagttcgtttatggggactacaaggtgtacgacgtccggaagatgattgcaaagtctgaacaggaaatcgggaaggccaccgccaaatatttcttctacagtaacattatgaatttttttaagactgaaattactctcgcaaacggcgagatcaggaagcgtcccctcatcgagacaaacggggagaccggggagatagtctgggacaaggggcgggacttcgctacggtgaggaaggtgctctcgatgccacaagtgaacatcgtcaaaaagacagaggtgcagaccggtggcttctcaaaggagtcaatcctgccaaaacgtaacagcgacaagctcatcgcccgcaagaaagactgggaccctaagaagtatggtgggttcgactcaccgacggtcgcatactccgttctggtcgtggcaaaggtggaaaagggcaagtccaaaaaactgaaatccgtgaaggagttgcttggcattaccatcatggaacgcagcagcttcgagaagaaccccattgacttcctggaggctaaagggtacaaggaggtcaagaaagatttaattattaagctacctaagtacagcttgttcgagctggagaacggccgaaaacgaatgctcgcatccgccggggaacttcaaaagggcaacgagcttgcgctgccctccaagtacgtgaacttcctgtacttggcatcccactacgagaaactcaagggtagcccagaggacaacgagcagaagcagctattcgtggagcagcacaagcactacctcgacgagataatcgagcagatcagtgagttcagtaagcgggtgatactcgcggacgccaacttggacaaggtgcttagtgcctacaacaagcaccgtgacaagcccatccgagaacaggctgagaacatcatccaccttttcactctgacaaacctcggtgctcccgccgccttcaaatacttcgacactaccatcgacaggaagcgctacacatctacgaaggaagttcttgacgctacgcttattcatcagtctatcacagggctgtacgagacaaggatcgaccttagccaactcggcggggat

SEQ ID NO: 119 - DNA, 4101 bp, Artificial sequence
  Synthetic Cas9
gacaagaagtacagcatcggcctggacatcggcaccaactctgtgggctgggccgtgatcaccgacgagtacaaggtgcccagcaagaaattcaaggtgctgggcaacaccgaccggcacagcatcaagaagaacctgatcggagccctgctgttcgacagcggcgaaacagccgaggccacccggctgaagagaaccgccagaagaagatacaccagacggaagaaccggatctgctatctgcaagagatcttcagcaacgagatggccaaggtggacgacagcttcttccacagactggaagagtccttcctggtggaagaggataagaagcacgagcggcaccccatcttcggcaacatcgtggacgaggtggcctaccacgagaagtaccccaccatctaccacctgagaaagaaactggtggacagcaccgacaaggccgacctgcggctgatctatctggccctggcccacatgatcaagttccggggccacttcctgatcgagggcgacctgaaccccgacaacagcgacgtggacaagctgttcatccagctggtgcagacctacaaccagctgttcgaggaaaaccccatcaacgccagcggcgtggacgccaaggccatcctgtctgccagactgagcaagagcagacggctggaaaatctgatcgcccagctgcccggcgagaagaagaatggcctgttcggaaacctgattgccctgagcctgggcctgacccccaacttcaagagcaacttcgacctggccgaggatgccaaactgcagctgagcaaggacacctacgacgacgacctggacaacctgctggcccagatcggcgaccagtacgccgacctgtttctggccgccaagaacctgtccgacgccatcctgctgagcgacatcctgagagtgaacaccgagatcaccaaggcccccctgagcgcctctatgatcaagagatacgacgagcaccaccaggacctgaccctgctgaaagctctcgtgcggcagcagctgcctgagaagtacaaagagattttcttcgaccagagcaagaacggctacgccggctacattgacggcggagccagccaggaagagttctacaagttcatcaagcccatcctggaaaagatggacggcaccgaggaactgctcgtgaagctgaacagagaggacctgctgcggaagcagcggaccttcgacaacggcagcatcccccaccagatccacctgggagagctgcacgccattctgcggcggcaggaagatttttacccattcctgaaggacaaccgggaaaagatcgagaagatcctgaccttccgcatcccctactacgtgggccctctggccaggggaaacagcagattcgcctggatgaccagaaagagcgaggaaaccatcaccccctggaacttcgaggaagtggtggacaagggcgcttccgcccagagcttcatcgagcggatgaccaacttcgataagaacctgcccaacgagaaggtgctgcccaagcacagcctgctgtacgagtacttcaccgtgtataacgagctgaccaaagtgaaatacgtgaccgagggaatgagaaagcccgccttcctgagcggcgagcagaaaaaggccatcgtggacctgctgttcaagaccaaccggaaagtgaccgtgaagcagctgaaagaggactacttcaagaaaatcgagtgcttcgactccgtggaaatctccggcgtggaagatcggttcaacgcctccctgggcacataccacgatctgctgaaaattatcaaggacaaggacttcctggacaatgaggaaaacgaggacattctggaagatatcgtgctgaccctgacactgtttgaggacagagagatgatcgaggaacggctgaaaacctatgcccacctgttcgacgacaaagtgatgaagcagctgaagcggcggagatacaccggctggggcaggctgagccggaagctgatcaacggcatccgggacaagcagtccggcaagacaatcctggatttcctgaagtccgacggcttcgccaacagaaacttcatgcagctgatccacgacgacagcctgacctttaaagaggacatccagaaagcccaggtgtccggccagggcgatagcctgcacgagcacattgccaatctggccggcagccccgccattaagaagggcatcctgcagacagtgaaggtggtggacgagctcgtgaaagtgatgggccggcacaagcccgagaacatcgtgatcgaaatggccagagagaaccagaccacccagaagggacagaagaacagccgcgagagaatgaagcggatcgaagagggcatcaaagagctgggcagccagatcctgaaagaacaccccgtggaaaacacccagctgcagaacgagaagctgtacctgtactacctgcagaatgggcgggatatgtacgtggaccaggaactggacatcaaccggctgtccgactacgatgtggaccatatcgtgcctcagagctttctgaaggacgactccatcgacaacaaggtgctgaccagaagcgacaagaaccggggcaagagcgacaacgtgccctccgaagaggtcgtgaagaagatgaagaactactggcggcagctgctgaacgccaagctgattacccagagaaagttcgacaatctgaccaaggccgagagaggcggcctgagcgaactggataaggccggcttcatcaagagacagctggtggaaacccggcagatcacaaagcacgtggcacagatcctggactcccggatgaacactaagtacgacgagaatgacaagctgatccgggaagtgaaagtgatcaccctgaagtccaagctggtgtccgatttccggaaggatttccagttttacaaagtgcgcgagatcaacaactaccaccacgcccacgacgcctacctgaacgccgtcgtgggaaccgccctgatcaaaaagtaccctaagctggaaagcgagttcgtgtacggcgactacaaggtgtacgacgtgcggaagatgatcgccaagagcgagcaggaaatcggcaaggctaccgccaagtacttcttctacagcaacatcatgaactttttcaagaccgagattaccctggccaacggcgagatccggaagcggcctctgatcgagacaaacggcgaaaccggggagatcgtgtgggataagggccgggattttgccaccgtgcggaaagtgctgagcatgccccaagtgaatatcgtgaaaaagaccgaggtgcagacaggcggcttcagcaaagagtctatcctgcccaagaggaacagcgataagctgatcgccagaaagaaggactgggaccctaagaagtacggcggcttcgacagccccaccgtggcctattctgtgctggtggtggccaaagtggaaaagggcaagtccaagaaactgaagagtgtgaaagagctgctggggatcaccatcatggaaagaagcagcttcgagaagaatcccatcgactttctggaagccaagggctacaaagaagtgaaaaaggacctgatcatcaagctgcctaagtactccctgttcgagctggaaaacggccggaagagaatgctggcctctgccggcgaactgcagaagggaaacgaactggccctgccctccaaatatgtgaacttcctgtacctggccagccactatgagaagctgaagggctcccccgaggataatgagcagaaacagctgtttgtggaacagcacaagcactacctggacgagatcatcgagcagatcagcgagttctccaagagagtgatcctggccgacgctaatctggacaaagtgctgtccgcctacaacaagcaccgggataagcccatcagagagcaggccgagaatatcatccacctgtttaccctgaccaatctgggagcccctgccgccttcaagtactttgacaccaccatcgaccggaagaggtacaccagcaccaaagaggtgctggacgccaccctgatccaccagagcatcaccggcctgtacgagacacggatcgacctgtctcagctgggaggtgac

SEQ ID NO: 120 - DNA, 4101 bp, Artificial sequence
  Synthetic eCas9
gacaagaagtacagcatcggcctggacatcggcaccaactctgtgggctgggccgtgatcaccgacgagtacaaggtgcccagcaagaaattcaaggtgctgggcaacaccgaccggcacagcatcaagaagaacctgatcggagccctgctgttcgacagcggcgaaacagccgaggccacccggctgaagagaaccgccagaagaagatacaccagacggaagaaccggatctgctatctgcaagagatcttcagcaacgagatggccaaggtggacgacagcttcttccacagactggaagagtccttcctggtggaagaggataagaagcacgagcggcaccccatcttcggcaacatcgtggacgaggtggcctaccacgagaagtaccccaccatctaccacctgagaaagaaactggtggacagcaccgacaaggccgacctgcggctgatctatctggccctggcccacatgatcaagttccggggccacttcctgatcgagggcgacctgaaccccgacaacagcgacgtggacaagctgttcatccagctggtgcagacctacaaccagctgttcgaggaaaaccccatcaacgccagcggcgtggacgccaaggccatcctgtctgccagactgagcaagagcagacggctggaaaatctgatcgcccagctgcccggcgagaagaagaatggcctgttcggaaacctgattgccctgagcctgggcctgacccccaacttcaagagcaacttcgacctggccgaggatgccaaactgcagctgagcaaggacacctacgacgacgacctggacaacctgctggcccagatcggcgaccagtacgccgacctgtttctggccgccaagaacctgtccgacgccatcctgctgagcgacatcctgagagtgaacaccgagatcaccaaggcccccctgagcgcctctatgatcaagagatacgacgagcaccaccaggacctgaccctgctgaaagctctcgtgcggcagcagctgcctgagaagtacaaagagattttcttcgaccagagcaagaacggctacgccggctacattgacggcggagccagccaggaagagttctacaagttcatcaagcccatcctggaaaagatggacggcaccgaggaactgctcgtgaagctgaacagagaggacctgctgcggaagcagcggaccttcgacaacggcagcatcccccaccagatccacctgggagagctgcacgccattctgcggcggcaggaagatttttacccattcctgaaggacaaccgggaaaagatcgagaagatcctgaccttccgcatcccctactacgtgggccctctggccaggggaaacagcagattcgcctggatgaccagaaagagcgaggaaaccatcaccccctggaacttcgaggaagtggtggacaagggcgcttccgcccagagcttcatcgagcggatgaccaacttcgataagaacctgcccaacgagaaggtgctgcccaagcacagcctgctgtacgagtacttcaccgtgtataacgagctgaccaaagtgaaatacgtgaccgagggaatgagaaagcccgccttcctgagcggcgagcagaaaaaggccatcgtggacctgctgttcaagaccaaccggaaagtgaccgtgaagcagctgaaagaggactacttcaagaaaatcgagtgcttcgactccgtggaaatctccggcgtggaagatcggttcaacgcctccctgggcacataccacgatctgctgaaaattatcaaggacaaggacttcctggacaatgaggaaaacgaggacattctggaagatatcgtgctgaccctgacactgtttgaggacagagagatgatcgaggaacggctgaaaacctatgcccacctgttcgacgacaaagtgatgaagcagctgaagcggcggagatacaccggctggggcaggctgagccggaagctgatcaacggcatccgggacaagcagtccggcaagacaatcctggatttcctgaagtccgacggcttcgccaacagaaacttcatgcagctgatccacgacgacagcctgacctttaaagaggacatccagaaagcccaggtgtccggccagggcgatagcctgcacgagcacattgccaatctggccggcagccccgccattaagaagggcatcctgcagacagtgaaggtggtggacgagctcgtgaaagtgatgggccggcacaagcccgagaacatcgtgatcgaaatggccagagagaaccagaccacccagaagggacagaagaacagccgcgagagaatgaagcggatcgaagagggcatcaaagagctgggcagccagatcctgaaagaacaccccgtggaaaacacccagctgcagaacgagaagctgtacctgtactacctgcagaatgggcgggatatgtacgtggaccaggaactggacatcaaccggctgtccgactacgatgtggaccatatcgtgcctcagagctttctggccgacgactccatcgacaacaaggtgctgaccagaagcgacaagaaccggggcaagagcgacaacgtgccctccgaagaggtcgtgaagaagatgaagaactactggcggcagctgctgaacgccaagctgattacccagagaaagttcgacaatctgaccaaggccgagagaggcggcctgagcgaactggataaggccggcttcatcaagagacagctggtggaaacccggcagatcacaaagcacgtggcacagatcctggactcccggatgaacactaagtacgacgagaatgacaagctgatccgggaagtgaaagtgatcaccctgaagtccaagctggtgtccgatttccggaaggatttccagttttacaaagtgcgcgagatcaacaactaccaccacgcccacgacgcctacctgaacgccgtcgtgggaaccgccctgatcaaaaagtaccctgccctggaaagcgagttcgtgtacggcgactacaaggtgtacgacgtgcggaagatgatcgccaagagcgagcaggaaatcggcaaggctaccgccaagtacttcttctacagcaacatcatgaactttttcaagaccgagattaccctggccaacggcgagatccggaaggcccctctgatcgagacaaacggcgaaaccggggagatcgtgtgggataagggccgggattttgccaccgtgcggaaagtgctgagcatgccccaagtgaatatcgtgaaaaagaccgaggtgcagacaggcggcttcagcaaagagtctatcctgcccaagaggaacagcgataagctgatcgccagaaagaaggactgggaccctaagaagtacggcggcttcgacagccccaccgtggcctattctgtgctggtggtggccaaagtggaaaagggcaagtccaagaaactgaagagtgtgaaagagctgctggggatcaccatcatggaaagaagcagcttcgagaagaatcccatcgactttctggaagccaagggctacaaagaagtgaaaaaggacctgatcatcaagctgcctaagtactccctgttcgagctggaaaacggccggaagagaatgctggcctctgccggcgaactgcagaagggaaacgaactggccctgccctccaaatatgtgaacttcctgtacctggccagccactatgagaagctgaagggctcccccgaggataatgagcagaaacagctgtttgtggaacagcacaagcactacctggacgagatcatcgagcagatcagcgagttctccaagagagtgatcctggccgacgctaatctggacaaagtgctgtccgcctacaacaagcaccgggataagcccatcagagagcaggccgagaatatcatccacctgtttaccctgaccaatctgggagcccctgccgccttcaagtactttgacaccaccatcgaccggaagaggtacaccagcaccaaagaggtgctggacgccaccctgatccaccagagcatcaccggcctgtacgagacacggatcgacctgtctcagctgggaggtgac

SEQ ID NO: 121 - DNA, 4101 bp, Artificial sequence
  Synthetic nCas9(D10A)
gacaagaagtacagcatcggcctggccatcggcaccaactctgtgggctgggccgtgatcaccgacgagtacaaggtgcccagcaagaaattcaaggtgctgggcaacaccgaccggcacagcatcaagaagaacctgatcggagccctgctgttcgacagcggcgaaacagccgaggccacccggctgaagagaaccgccagaagaagatacaccagacggaagaaccggatctgctatctgcaagagatcttcagcaacgagatggccaaggtggacgacagcttcttccacagactggaagagtccttcctggtggaagaggataagaagcacgagcggcaccccatcttcggcaacatcgtggacgaggtggcctaccacgagaagtaccccaccatctaccacctgagaaagaaactggtggacagcaccgacaaggccgacctgcggctgatctatctggccctggcccacatgatcaagttccggggccacttcctgatcgagggcgacctgaaccccgacaacagcgacgtggacaagctgttcatccagctggtgcagacctacaaccagctgttcgaggaaaaccccatcaacgccagcggcgtggacgccaaggccatcctgtctgccagactgagcaagagcagacggctggaaaatctgatcgcccagctgcccggcgagaagaagaatggcctgttcggaaacctgattgccctgagcctgggcctgacccccaacttcaagagcaacttcgacctggccgaggatgccaaactgcagctgagcaaggacacctacgacgacgacctggacaacctgctggcccagatcggcgaccagtacgccgacctgtttctggccgccaagaacctgtccgacgccatcctgctgagcgacatcctgagagtgaacaccgagatcaccaaggcccccctgagcgcctctatgatcaagagatacgacgagcaccaccaggacctgaccctgctgaaagctctcgtgcggcagcagctgcctgagaagtacaaagagattttcttcgaccagagcaagaacggctacgccggctacattgacggcggagccagccaggaagagttctacaagttcatcaagcccatcctggaaaagatggacggcaccgaggaactgctcgtgaagctgaacagagaggacctgctgcggaagcagcggaccttcgacaacggcagcatcccccaccagatccacctgggagagctgcacgccattctgcggcggcaggaagatttttacccattcctgaaggacaaccgggaaaagatcgagaagatcctgaccttccgcatcccctactacgtgggccctctggccaggggaaacagcagattcgcctggatgaccagaaagagcgaggaaaccatcaccccctggaacttcgaggaagtggtggacaagggcgcttccgcccagagcttcatcgagcggatgaccaacttcgataagaacctgcccaacgagaaggtgctgcccaagcacagcctgctgtacgagtacttcaccgtgtataacgagctgaccaaagtgaaatacgtgaccgagggaatgagaaagcccgccttcctgagcggcgagcagaaaaaggccatcgtggacctgctgttcaagaccaaccggaaagtgaccgtgaagcagctgaaagaggactacttcaagaaaatcgagtgcttcgactccgtggaaatctccggcgtggaagatcggttcaacgcctccctgggcacataccacgatctgctgaaaattatcaaggacaaggacttcctggacaatgaggaaaacgaggacattctggaagatatcgtgctgaccctgacactgtttgaggacagagagatgatcgaggaacggctgaaaacctatgcccacctgttcgacgacaaagtgatgaagcagctgaagcggcggagatacaccggctggggcaggctgagccggaagctgatcaacggcatccgggacaagcagtccggcaagacaatcctggatttcctgaagtccgacggcttcgccaacagaaacttcatgcagctgatccacgacgacagcctgacctttaaagaggacatccagaaagcccaggtgtccggccagggcgatagcctgcacgagcacattgccaatctggccggcagccccgccattaagaagggcatcctgcagacagtgaaggtggtggacgagctcgtgaaagtgatgggccggcacaagcccgagaacatcgtgatcgaaatggccagagagaaccagaccacccagaagggacagaagaacagccgcgagagaatgaagcggatcgaagagggcatcaaagagctgggcagccagatcctgaaagaacaccccgtggaaaacacccagctgcagaacgagaagctgtacctgtactacctgcagaatgggcgggatatgtacgtggaccaggaactggacatcaaccggctgtccgactacgatgtggaccatatcgtgcctcagagctttctgaaggacgactccatcgacaacaaggtgctgaccagaagcgacaagaaccggggcaagagcgacaacgtgccctccgaagaggtcgtgaagaagatgaagaactactggcggcagctgctgaacgccaagctgattacccagagaaagttcgacaatctgaccaaggccgagagaggcggcctgagcgaactggataaggccggcttcatcaagagacagctggtggaaacccggcagatcacaaagcacgtggcacagatcctggactcccggatgaacactaagtacgacgagaatgacaagctgatccgggaagtgaaagtgatcaccctgaagtccaagctggtgtccgatttccggaaggatttccagttttacaaagtgcgcgagatcaacaactaccaccacgcccacgacgcctacctgaacgccgtcgtgggaaccgccctgatcaaaaagtaccctaagctggaaagcgagttcgtgtacggcgactacaaggtgtacgacgtgcggaagatgatcgccaagagcgagcaggaaatcggcaaggctaccgccaagtacttcttctacagcaacatcatgaactttttcaagaccgagattaccctggccaacggcgagatccggaagcggcctctgatcgagacaaacggcgaaaccggggagatcgtgtgggataagggccgggattttgccaccgtgcggaaagtgctgagcatgccccaagtgaatatcgtgaaaaagaccgaggtgcagacaggcggcttcagcaaagagtctatcctgcccaagaggaacagcgataagctgatcgccagaaagaaggactgggaccctaagaagtacggcggcttcgacagccccaccgtggcctattctgtgctggtggtggccaaagtggaaaagggcaagtccaagaaactgaagagtgtgaaagagctgctggggatcaccatcatggaaagaagcagcttcgagaagaatcccatcgactttctggaagccaagggctacaaagaagtgaaaaaggacctgatcatcaagctgcctaagtactccctgttcgagctggaaaacggccggaagagaatgctggcctctgccggcgaactgcagaagggaaacgaactggccctgccctccaaatatgtgaacttcctgtacctggccagccactatgagaagctgaagggctcccccgaggataatgagcagaaacagctgtttgtggaacagcacaagcactacctggacgagatcatcgagcagatcagcgagttctccaagagagtgatcctggccgacgctaatctggacaaagtgctgtccgcctacaacaagcaccgggataagcccatcagagagcaggccgagaatatcatccacctgtttaccctgaccaatctgggagcccctgccgccttcaagtactttgacaccaccatcgaccggaagaggtacaccagcaccaaagaggtgctggacgccaccctgatccaccagagcatcaccggcctgtacgagacacggatcgacctgtctcagctgggaggtgac

SEQ ID NO: 122 - DNA, 4101 bp, Artificial sequence
  Synthetic nCas9(H840A)
gacaagaagtacagcatcggcctggacatcggcaccaactctgtgggctgggccgtgatcaccgacgagtacaaggtgcccagcaagaaattcaaggtgctgggcaacaccgaccggcacagcatcaagaagaacctgatcggagccctgctgttcgacagcggcgaaacagccgaggccacccggctgaagagaaccgccagaagaagatacaccagacggaagaaccggatctgctatctgcaagagatcttcagcaacgagatggccaaggtggacgacagcttcttccacagactggaagagtccttcctggtggaagaggataagaagcacgagcggcaccccatcttcggcaacatcgtggacgaggtggcctaccacgagaagtaccccaccatctaccacctgagaaagaaactggtggacagcaccgacaaggccgacctgcggctgatctatctggccctggcccacatgatcaagttccggggccacttcctgatcgagggcgacctgaaccccgacaacagcgacgtggacaagctgttcatccagctggtgcagacctacaaccagctgttcgaggaaaaccccatcaacgccagcggcgtggacgccaaggccatcctgtctgccagactgagcaagagcagacggctggaaaatctgatcgcccagctgcccggcgagaagaagaatggcctgttcggaaacctgattgccctgagcctgggcctgacccccaacttcaagagcaacttcgacctggccgaggatgccaaactgcagctgagcaaggacacctacgacgacgacctggacaacctgctggcccagatcggcgaccagtacgccgacctgtttctggccgccaagaacctgtccgacgccatcctgctgagcgacatcctgagagtgaacaccgagatcaccaaggcccccctgagcgcctctatgatcaagagatacgacgagcaccaccaggacctgaccctgctgaaagctctcgtgcggcagcagctgcctgagaagtacaaagagattttcttcgaccagagcaagaacggctacgccggctacattgacggcggagccagccaggaagagttctacaagttcatcaagcccatcctggaaaagatggacggcaccgaggaactgctcgtgaagctgaacagagaggacctgctgcggaagcagcggaccttcgacaacggcagcatcccccaccagatccacctgggagagctgcacgccattctgcggcggcaggaagatttttacccattcctgaaggacaaccgggaaaagatcgagaagatcctgaccttccgcatcccctactacgtgggccctctggccaggggaaacagcagattcgcctggatgaccagaaagagcgaggaaaccatcaccccctggaacttcgaggaagtggtggacaagggcgcttccgcccagagcttcatcgagcggatgaccaacttcgataagaacctgcccaacgagaaggtgctgcccaagcacagcctgctgtacgagtacttcaccgtgtataacgagctgaccaaagtgaaatacgtgaccgagggaatgagaaagcccgccttcctgagcggcgagcagaaaaaggccatcgtggacctgctgttcaagaccaaccggaaagtgaccgtgaagcagctgaaagaggactacttcaagaaaatcgagtgcttcgactccgtggaaatctccggcgtggaagatcggttcaacgcctccctgggcacataccacgatctgctgaaaattatcaaggacaaggacttcctggacaatgaggaaaacgaggacattctggaagatatcgtgctgaccctgacactgtttgaggacagagagatgatcgaggaacggctgaaaacctatgcccacctgttcgacgacaaagtgatgaagcagctgaagcggcggagatacaccggctggggcaggctgagccggaagctgatcaacggcatccgggacaagcagtccggcaagacaatcctggatttcctgaagtccgacggcttcgccaacagaaacttcatgcagctgatccacgacgacagcctgacctttaaagaggacatccagaaagcccaggtgtccggccagggcgatagcctgcacgagcacattgccaatctggccggcagccccgccattaagaagggcatcctgcagacagtgaaggtggtggacgagctcgtgaaagtgatgggccggcacaagcccgagaacatcgtgatcgaaatggccagagagaaccagaccacccagaagggacagaagaacagccgcgagagaatgaagcggatcgaagagggcatcaaagagctgggcagccagatcctgaaagaacaccccgtggaaaacacccagctgcagaacgagaagctgtacctgtactacctgcagaatgggcgggatatgtacgtggaccaggaactggacatcaaccggctgtccgactacgatgtggacgccatcgtgcctcagagctttctgaaggacgactccatcgacaacaaggtgctgaccagaagcgacaagaaccggggcaagagcgacaacgtgccctccgaagaggtcgtgaagaagatgaagaactactggcggcagctgctgaacgccaagctgattacccagagaaagttcgacaatctgaccaaggccgagagaggcggcctgagcgaactggataaggccggcttcatcaagagacagctggtggaaacccggcagatcacaaagcacgtggcacagatcctggactcccggatgaacactaagtacgacgagaatgacaagctgatccgggaagtgaaagtgatcaccctgaagtccaagctggtgtccgatttccggaaggatttccagttttacaaagtgcgcgagatcaacaactaccaccacgcccacgacgcctacctgaacgccgtcgtgggaaccgccctgatcaaaaagtaccctaagctggaaagcgagttcgtgtacggcgactacaaggtgtacgacgtgcggaagatgatcgccaagagcgagcaggaaatcggcaaggctaccgccaagtacttcttctacagcaacatcatgaactttttcaagaccgagattaccctggccaacggcgagatccggaagcggcctctgatcgagacaaacggcgaaaccggggagatcgtgtgggataagggccgggattttgccaccgtgcggaaagtgctgagcatgccccaagtgaatatcgtgaaaaagaccgaggtgcagacaggcggcttcagcaaagagtctatcctgcccaagaggaacagcgataagctgatcgccagaaagaaggactgggaccctaagaagtacggcggcttcgacagccccaccgtggcctattctgtgctggtggtggccaaagtggaaaagggcaagtccaagaaactgaagagtgtgaaagagctgctggggatcaccatcatggaaagaagcagcttcgagaagaatcccatcgactttctggaagccaagggctacaaagaagtgaaaaaggacctgatcatcaagctgcctaagtactccctgttcgagctggaaaacggccggaagagaatgctggcctctgccggcgaactgcagaagggaaacgaactggccctgccctccaaatatgtgaacttcctgtacctggccagccactatgagaagctgaagggctcccccgaggataatgagcagaaacagctgtttgtggaacagcacaagcactacctggacgagatcatcgagcagatcagcgagttctccaagagagtgatcctggccgacgctaatctggacaaagtgctgtccgcctacaacaagcaccgggataagcccatcagagagcaggccgagaatatcatccacctgtttaccctgaccaatctgggagcccctgccgccttcaagtactttgacaccaccatcgaccggaagaggtacaccagcaccaaagaggtgctggacgccaccctgatccaccagagcatcaccggcctgtacgagacacggatcgacctgtctcagctgggaggtgac

SEQ ID NO: 123 - protein, 339 aa, Homo sapiens
MAMQMQLEANADTSVEEESFGPQPISRLEQCGINANDVKKLEEAGFHTVEAVAYAPKKELINIKGISEAKADKILAEAAKLVPMGFTTATEFHQRRSEIIQITTGSKELDKLLQGGIETGSITEMFGEFRTGKTQICHTLAVTCQLPIDRGGGEGKAMYIDTEGTFRPERLLAVAERYGLSGSDVLDNVAYARAFNTDHQTQLLYQASAMMVESRYALLIVDSATALYRTDYSGRGELSARQMHLARFLRMLLRLADEFGVAVVITNQVVAQVDGAAMFAADPKKPIGGNIIAHASTTRLYLRKGRGETRICKIYDSPCLPEAEAMFAINADGVGDAKD

SEQ ID NO: 124 - protein, 418 aa, Homo sapiens
MSGTEEAILGGRDSHPAAGGGSVLCFGQCQYTAEEYQAIQKALRQRLGPEYISSRMAGGGQKVCYIEGHRVINLANEMFGYNGWAHSITQQNVDFVDLNNGKFYVGVCAFVRVQLKDGSYHEDVGYGVSEGLKSKALSLEKARKEAVTDGLKRALRSFGNALGNCILDKDYLRSLNKLPRQLPLEVDLTKAKRQDLEPSVEEARYNSCRPNMALGHPQLQQVTSPSRPSHAVIPADQDCSSRSLSSSAVESEATHQRKLRQKQLQQQFRERMEKQQVRVSTPSAEKSEAAPPAPPVTHSTPVTVSEPLLEKDFLAGVTQELIKTLEDNSEKWAVTPDAGDGVVKPSSRADPAQTSDTLALNNQMVTQNRTPHSVCHQKPQAKSGSWDLQTYSADQRTTGNWESHRKSQDMKKRKYDPS

SEQ ID NO: 125 - protein, 348 aa, Bacillus subtilis
MSDRQAALDMALKQIEKQFGKGSIMKLGEKTDTRISTVPSGSLALDTALGIGGYPRGRIIEVYGPESSGKTTVALHAIAEVQQQGGQAAFIDAEHALDPVYAQKLGVNIEELLLSQPDTGEQALEIAEALVRSGAVDIVVVDSVAALVPKAEIEGDMGDSHVGLQARLMSQALRKLSGAINKSKTIAIFINQIREKVGVMFGNPETTPGGRALKFYSSVRLEVRRAEQLKQGNDVMGNKTKIKVVKNKVAPPFRTAEVDIMYGEGISKEGEIIDLGTELDIVQKSGSWYSYEEERLGQGRENAKQFLKENKDIMLMIQEQIREHYGLDNNGVVQQQAEETQEELEFEE

SEQ ID NO: 126 - protein, 353 aa, Escherichia coli
MAIDENKQKALAAALGQIEKQFGKGSIMRLGEDRSMDVETISTGSLSLDIALGAGGLPMGRIVEIYGPESSGKTTLTLQVIAAAQREGKTCAFIDAEHALDPIYARKLGVDIDNLLCSQPDTGEQALEICDALARSGAVDVIVVDSVAALTPKAEIEGEIGDSHMGLAARMMSQAMRKLAGNLKQSNTLLIFINQIRMKIGVMFGNPETTTGGNALKFYASVRLDIRRIGAVKEGENVVGSETRVKVVKNKIAAPFKQAEFQILYGEGINFYGELVDLGVKEKLIEKAGAWYSYKGEKIGQGKANATAWLKDNPETAKEIEKKVRELLLSNPNSTPDFSVDDSEGVAETNEDF

SEQ ID NO: 127 - protein, 162 aa, Escherichia phage P1
MAQRGVNKVILIGTLGQDPEIRYIPNGGAVGRLSIATNESWRDKQTGQQKEQTEWHKVVLFGKLAEIASEYLRKGSQVYIEGKLKTRKWTDDAGVERYTTEIIVSQGGTMQMIGARRDDSQSSNGWGQSNQPQNHQQYSGGGKPQSNANNEPPMDFDDDIPF

SEQ ID NO: 128 - protein, 36 aa, Homo sapiens
ALDFLSRLPLPPPVSPICTFVSPAAQKAFQPPRSCG

SEQ ID NO: 129 - protein, 866 aa, Escherichia coli
MSTKPLFLLRKAKKSSGEPDVVLWASNDFESTCATLDYLIVKSGKKLSSYFKAVATNFPVVNDLPAEGEIDFTWSERYQLSKDSMTWELKPGAAPDNAHYQGNTNVNGEDMTEIEENMLLPISGQELPIRWLAQHGSEKPVTHVSRDGLQALHIARAEELPAVTALAVSHKTSLLDPLEIRELHKLVRDTDKVFPNPGNSNLGLITAFFEAYLNADYTDRGLLTKEWMKGNRVSHITRTASGANAGGGNLTDRGEGFVHDLTSLARDVATGVLARSMDLDIYNLHPAHAKRIEEIIAENKPPFSVFRDKFITMPGGLDYSRAIVVASVKEAPIGIEVIPAHVTEYLNKVLTETDHANPDPEIVDIACGRSSAPMPQRVTEEGKQDDEEKPQPSGTTAVEQGEAETMEPDATEHHQDTQPLDAQSQVNSVDAKYQELRAELHEARKNIPSKNPVDDDKLLAASRGEFVDGISDPNDPKWVKGIQTRDCVYQNQPETEKTSPDMNQPEPVVQQEPEIACNACGQTGGDNCPDCGAVMGDATYQETFDEESQVEAKENDPEEMEGAEHPHNENAGSDPHRDCSDETGEVADPVIVEDIEPGIYYGISNENYHAGPGISKSQLDDIADTPALYLWRKNAPVDTTKTKTLDLGTAFHCRVLEPEEFSNRFIVAPEFNRRTNAGKEEEKAFLMECASTGKTVITAEEGRKIELMYQSVMALPLGQWLVESAGHAESSIYWEDPETGILCRCRPDKIIPEFHWIMDVKTTADIQRFKTAYYDYRYHVQDAFYSDGYEAQFGVQPTFVFLVASTTIECGRYPVEIFMMGEEAKLAGQQEYHRNLRTLSDCLNTDEWPAIKTLSLPRWAKEYAND

SEQ ID NO: 130 - protein, 577 aa, Escherichia coli
MKQQIQLRRREVDETADLPAELPPLLRRLYASRGVRSAQELERSVKGMLPWQQLSGVEKAVEILYNAFREGTRIIVVGDFDADGATSTALSVLAMRSLGCSNIDYLVPNRFEDGYGLSPEVVDQAHARGAQLIVTVDNGISSHAGVEHARSLGIPVIVTDHHLPGDTLPAAEAIINPNLRDCNFPSKSLAGVGVAFYLMLALRTFLRDQGWFDERNIAIPNLAELLDLVALGTVADVVPLDANNRILTWQGMSRIRAGKCRPGIKALLEVANRDAQKLAASDLGFALGPRLNAAGRLDDMSVGVALLLCDNIGEARVLANELDALNQTRKEIEQGMQIEALTLCEKLERSRDTLPGGLAMYHPEWHQGVVGILASRIKERFHRPVIAFAPAGDGTLKGSGRSIQGLHMRDALERLDTLYPGMMLKFGGHAMAAGLSLEEDKFKLFQQRFGELVTEWLDPSLLQGEVVSDGPLSPAEMTMEVAQLLRDAGPWGQMFPEPLFDGHFRLLQQRLVGERHLKVMVEPVGGGPLLDGIAFNVDTALWPDNGVREVQLAYKLDINEFRGNRSLQIIIDNIWPI

SEQ ID NO: 131 - protein, 291 aa, Escherichia phage T5
MSKSWGKFIEEEEAEMASRRNLMIVDGTNLGFRFKHNNSKKPFASSYVSTIQSLAKSYSARTTIVLGDKGKSVFRLEHLPEYKGNRDEKYAQRTEEEKALDEQFFEYLKDAFELCKTTFPTFTIRGVEADDMAAYIVKLIGHLYDHVWLISTDGDWDTLLTDKVSRFSFTTRREYHLRDMYEHHNVDDVEQFISLKAIMGDLGDNIRGVEGIGAKRGYNIIREFGNVLDIIDQLPLPGKQKYIQNLNASEELLFRNLILVDLPTYCVDAIAAVGQDVLDKFTKDILEIAEQ

SEQ ID NO: 132 - protein, 300 aa, Escherichia phage T7
MALLDLKQFYELREGCDDKGILVMDGDWLVFQAMSAAEFDASWEEEIWHRCCDHAKARQILEDSIKSYETRKKAWAGAPIVLAFTDSVNWRKELVDPNYKANRKAVKKPVGYFEFLDALFEREEFYCIREPMLEGDDVMGVIASNPSAFGARKAVIISCDKDFKTIPNCDFLWCTTGNILTQTEESADWWHLFQTIKGDITDGYSGIAGWGDTAEDFLNNPFITEPKTSVLKSGKNKGQEVTKWVKRDPEPHETLWDCIKSIGAKAGMTEEDIIKQGQMARILRFNEYNFIDKEIYLWRP

SEQ ID NO: 133 - protein, 226 aa, Escherichia phage lambda
MTPDIILQRTGIDVRAVEQGDDAWHKLRLGVITASEVHNVIAKPRSGKKWPDMKMSYFHTLLAEVCTGVAPEVNAKALAWGKQYENDARTLFEFTSGVNVTESPIIYRDESMRTACSPDGLCSDGNGLELKCPFTSRDFMKFRLGGFEAIKSAYMAQVQYSMWVTRKNAWYFANYDPRMKREGLHYVVIERDEKYMASFDEIVPEFIEKMDEALAEIGFVFGEQWR

SEQ ID NO: 134 - protein, 475 aa, Escherichia coli
MMNDGKQQSTFLFHDYETFGTHPALDRPAQFAAIRTDSEFNVIGEPEVFYCKPADDYLPQPGAVLITGITPQEARAKGENEAAFAARIHSLFTVPKTCILGYNNVRFDDEVTRNIFYRNFYDPYAWSWQHDNSRWDLLDVMRACYALRPEGINWPENDDGLPSFRLEHLTKANGIEHSNAHDAMADVYATIAMAKLVKTRQPRLFDYLFTHRNKHKLMALIDVPQMKPLVHVSGMFGAWRGNTSWVAPLAWHPENRNAVIMVDLAGDISPLLELDSDTLRERLYTAKTDLGDNAAVPVKLVHINKCPVLAQANTLRPEDADRLGINRQHCLDNLKILRENPQVREKVVAIFAEAEPFTPSDNVDAQLYNGFFSDADRAAMKIVLETEPRNLPALDITFVDKRIEKLLFNYRARNFPGTLDYAEQQRWLEHRRQVFTPEFLQGYADELQMLVQQYADDKEKVALLKALWQYAEEIV

SEQ ID NO: 135 - protein, 846 aa, Homo sapiens
MGIQGLLQFIKEASEPIHVRKYKGQVVAVDTYCWLHKGAIACAEKLAKGEPTDRYVGFCMKFVNMLLSHGIKPILVFDGCTLPSKKEVERSRRERRQANLLKGKQLLREGKVSEARECFTRSINITHAMAHKVIKAARSQGVDCLVAPYEADAQLAYLNKAGIVQAIITEDSDLLAFGCKKVILKMDQFGNGLEIDQARLGMCRQLGDVFTEEKFRYMCILSGCDYLSSLRGIGLAKACKVLRLANNPDIVKVIKKIGHYLKMNITVPEDYINGFIRANNTFLYQLVFDPIKRKLIPLNAYEDDVDPETLSYAGQYVDDSIALQIALGNKDINTFEQIDDYNPDTAMPAHSRSHSWDDKTCQKSANVSSIWHRNYSPRPESGTVSDAPQLKENPSTVGVERVISTKGLNLPRKSSIVKRPRSAELSEDDLLSQYSLSFTKKTKKNSSEGNKSLSFSEVFVPDLVNGPTNKKSVSTPPRTRNKFATFLQRKNEESGAVVVPGTRSRFFCSSDSTDCVSNKVSIQPLDETAVTDKENNLHESEYGDQEGKRLVDTDVARNSSDDIPNNHIPGDHIPDKATVFTDEESYSFESSKFTRTISPPTLGTLRSCFSWSGGLGDFSRTPSPSPSTALQQFRRKSDSPTSLPENNMSDVSQLKSEESSDDESHPLREEACSSQSQESGEFSLQSSNASKLSQCSSKDSDSEESDCNIKLLDSQSDQTSKLRLSHFSKKDTPLRNKVPGLYKSSSADSLSTTKIKPLGPARASGLSKKPASIQKRKHHNAENKPGLQIKLNELWKNFGFKKDSEKLPPCKKPLSPVRDNIQLTPEAEEDIFNKPECGRVQRAIFQ

SEQ ID NO: 136 - DNA, 23 bp, Artificial sequence
  Synthetic oligonucleotide
gctcagcaggcacctgcctcagc

SEQ ID NO: 137 - DNA, 23 bp, Artificial sequence
  Synthetic oligonucleotide
ctgatggtccatgtctgttactc

SEQ ID NO: 138 - DNA, 27 bp, Artificial sequence
  Synthetic oligonucleotide
tttggctcactcctgctcggtgaattt

SEQ ID NO: 139 - DNA, 27 bp, Artificial sequence
  Synthetic oligonucleotide
tttcgcgcttgttccaatcagtacgca

SEQ ID NO: 140 - DNA, 20 bp, Artificial sequence
  Synthetic oligonucleotide
gagtccgagcagaagaagaa

SEQ ID NO: 141 - DNA, 20 bp, Artificial sequence
  Synthetic oligonucleotide
gcattttcaggaggaagcga

SEQ ID NO: 142 - DNA, 20 bp, Artificial sequence
  Synthetic oligonucleotide
gtcatcttagtcattacctg

SEQ ID NO: 143 - DNA, 20 bp, Artificial sequence
  Synthetic oligonucleotide
ggaatcccttctgcagcacc

SEQ ID NO: 144 - DNA, 22 bp, Artificial sequence
  Synthetic oligonucleotide
acgtactgatgttaacagctga

SEQ ID NO: 145 - DNA, 22 bp, Artificial sequence
  Synthetic oligonucleotide
ggtcagctgttaacatcagtac

SEQ ID NO: 146 - DNA, 22 bp, Artificial sequence
  Synthetic oligonucleotide
tccagcccgctggccctgtaaa

SEQ ID NO: 147 - protein, 174 aa, Escherichia phage Mu
MAKPAKRIKSAAAAYVPQNRDAVITDIKRIGDLQREASRLETEMNDAIAEITEKFAARIAPIKTDIETLSKGVQGWCEANRDELTNGGKVKTANLVTGDVSWRVRPPSVSIRGMDAVMETLERLGLQRFIRTKQEINKEAILLEPKAVAGVAGITVKSGIEDFSIIPFEQEAGI

SEQ ID NO: 148 - protein, 1228 aa, Artificial sequence
  Synthetic LbCas12a H759A
MSKLEKFTNCYSLSKTLRFKAIPVGKTQENIDNKRLLVEDEKRAEDYKGVKKLLDRYYLSFINDVLHSIKLKNLNNYISLFRKKTRTEKENKELENLEINLRKEIAKAFKGNEGYKSLFKKDIIETILPEFLDDKDEIALVNSFNGFTTAFTGFFDNRENMFSEEAKSTSIAFRCINENLTRYISNMDIFEKVDAIFDKHEVQEIKEKILNSDYDVEDFFEGEFFNFVLTQEGIDVYNAIIGGFVTESGEKIKGLNEYINLYNQKTKQKLPKFKPLYKQVLSDRESLSFYGEGYTSDEEVLEVFRNTLNKNSEIFSSIKKLEKLFKNFDEYSSAGIFVKNGPAISTISKDIFGEWNVIRDKWNAEYDDIHLKKKAVVTEKYEDDRRKSFKKIGSFSLEQLQEYADADLSVVEKLKEIIIQKVDEIYKVYGSSEKLFDADFVLEKSLKKNDAVVAIMKDLLDSVKSFENYIKAFFGEGKETNRDESFYGDFVLAYDILLKVDHIYDAIRNYVTQKPYSKDKFKLYFQNPQFMGGWDKDKETDYRATILRYGSKYYLAIMDKKYAKCLQKIDKDDVNGNYEKINYKLLPGPNKMLPKVFFSKKWMAYYNPSEDIQKIYKNGTFKKGDMFNLNDCHKLIDFFKDSISRYPKWSNAYDFNFSETEKYKDIAGFYREVEEQGYKVSFESASKKEVDKLVEEGKLYMFQIYNKDFSDKSHGTPNLHTMYFKLLFDENNHGQIRLSGGAELFMRRASLKKEELVVAPANSPIANKNPDNPKKTTTLSYDVYKDKRFSEDQYELHIPIAINKCPKNIFKINTEVRVLLKHDDNPYVIGIDRGERNLLYIVVVDGKGNIVEQYSLNEIINNFNGIRIKTDYHSLLDKKEKERFEARQNWTSIENIKELKAGYISQVVHKICELVEKYDAVIALEDLNSGFKNSRVKVEKQVYQKFEKMLIDKLNYMVDKKSNPCATGGALKGYQITNKFESFKSMSTQNGFIFYIPAWLTSKIDPSTGFVNLLKTKYTSIADSKKFISSFDRIMYVPEEDLFEFALDYKNFSRTDADYIKKWKLYSYGNRIRIFRNPKKNNVFDWEEVCLTSAYKELFNKYGINYQQGDIRALLCEQSDKAFYSSFMALMSLMLQMRNSITGRTDVDFLISPVKNSDGIFYDSRNYEAQENAILPKNADANGAYNIARKVLWAIGQFKKAEDEKLDKVKIAISNKEWLEYAQTSVKH

SEQ ID NO: 149 - protein, 1307 aa, Artificial sequence
  Synthetic EnAsCas12a H800A
MTQFEGFTNLYQVSKTLRFELIPQGKTLKHIQEQGFIEEDKARNDHYKELKPIIDRIYKTYADQCLQLVQLDWENLSAAIDSYRKEKTEETRNALIEEQATYRNAIHDYFIGRTDNLTDAINKRHAEIYKGLFKAELFNGKVLKQLGTVTTTEHENALLRSFDKFTTYFSGFYRNRKNVFSAEDISTAIPHRIVQDNFPKFKENCHIFTRLITAVPSLREHFENVKKAIGIFVSTSIEEVFSFPFYNQLLTQTQIDLYNQLLGGISREAGTEKIKGLNEVLNLAIQKNDETAHIIASLPHRFIPLFKQILSDRNTLSFILEEFKSDEEVIQSFCKYKTLLRNENVLETAEALFNELNSIDLTHIFISHKKLETISSALCDHWDTLRNALYERRISELTGKITKSAKEKVQRSLKHEDINLQEIISAAGKELSEAFKQKTSEILSHAHAALDQPLPTTLKKQEEKEILKSQLDSLLGLYHLLDWFAVDESNEVDPEFSARLTGIKLEMEPSLSFYNKARNYATKKPYSVEKFKLNFQMPTLARGWDVNREKNNGAILFVKNGLYYLGIMPKQKGRYKALSFEPTEKTSEGFDKMYYDYFPDAAKMIPKCSTQLKAVTAHFQTHTTPILLSNNFIEPLEITKEIYDLNNPEKEPKKFQTAYAKKTGDQKGYREALCKWIDFTRDFLSKYTKTTSIDLSSLRPSSQYKDLGEYYAELNPLLYHISFQRIAEKEIMDAVETGKLYLFQIYNKDFAKGHHGKPNLHTLYWTGLFSPENLAKTSIKLNGQAELFYRPKSRMKRMAARLGEKMLNKKLKDQKTPIPDTLYQELYDYVNHRLSHDLSDEARALLPNVITKEVSHEIIKDRRFTSDKFFFHVPITLNYQAANSPSKFNQRVNAYLKEHPETPIIGIDRGERNLIYITVIDSTGKILEQRSLNTIQQFDYQKKLDNREKERVAARQAWSVVGTIKDLKQGYLSQVIHEIVDLMIHYQAVVVLENLNFGFKSKRTGIAEKAVYQQFEKMLIDKLNCLVLKDYPAEKVGGVLNPYQLTDQFTSFAKMGTQSGFLFYVPAPYTSKIDPLTGFVDPFVWKTIKNHESRKHFLEGFDFLHYDVKTGDFILHFKMNRNLSFQRGLPGFMPAWDIVFEKNETQFDAKGTPFIAGKRIVPVIENHRFTGRYRDLYPANELIALLEEKGIVFRDGSNILPKLLENDDSHAIDTMVALIRSVLQMRNSNAATGEDYINSPVRDLNGVCFDSRFQNPEWPMDADANGAYHIALKGQLLLNHLKESKDLKLQNGISNQDWLAYIQELRN

SEQ ID NO: 150 - protein, 1307 aa, Artificial sequence
  Synthetic EnAsCas12a
MTQFEGFTNLYQVSKTLRFELIPQGKTLKHIQEQGFIEEDKARNDHYKELKPIIDRIYKTYADQCLQLVQLDWENLSAAIDSYRKEKTEETRNALIEEQATYRNAIHDYFIGRTDNLTDAINKRHAEIYKGLFKAELFNGKVLKQLGTVTTTEHENALLRSFDKFTTYFSGFYRNRKNVFSAEDISTAIPHRIVQDNFPKFKENCHIFTRLITAVPSLREHFENVKKAIGIFVSTSIEEVFSFPFYNQLLTQTQIDLYNQLLGGISREAGTEKIKGLNEVLNLAIQKNDETAHIIASLPHRFIPLFKQILSDRNTLSFILEEFKSDEEVIQSFCKYKTLLRNENVLETAEALFNELNSIDLTHIFISHKKLETISSALCDHWDTLRNALYERRISELTGKITKSAKEKVQRSLKHEDINLQEIISAAGKELSEAFKQKTSEILSHAHAALDQPLPTTLKKQEEKEILKSQLDSLLGLYHLLDWFAVDESNEVDPEFSARLTGIKLEMEPSLSFYNKARNYATKKPYSVEKFKLNFQMPTLARGWDVNREKNNGAILFVKNGLYYLGIMPKQKGRYKALSFEPTEKTSEGFDKMYYDYFPDAAKMIPKCSTQLKAVTAHFQTHTTPILLSNNFIEPLEITKEIYDLNNPEKEPKKFQTAYAKKTGDQKGYREALCKWIDFTRDFLSKYTKTTSIDLSSLRPSSQYKDLGEYYAELNPLLYHISFQRIAEKEIMDAVETGKLYLFQIYNKDFAKGHHGKPNLHTLYWTGLFSPENLAKTSIKLNGQAELFYRPKSRMKRMAHRLGEKMLNKKLKDQKTPIPDTLYQELYDYVNHRLSHDLSDEARALLPNVITKEVSHEIIKDRRFTSDKFFFHVPITLNYQAANSPSKFNQRVNAYLKEHPETPIIGIDRGERNLIYITVIDSTGKILEQRSLNTIQQFDYQKKLDNREKERVAARQAWSVVGTIKDLKQGYLSQVIHEIVDLMIHYQAVVVLENLNFGFKSKRTGIAEKAVYQQFEKMLIDKLNCLVLKDYPAEKVGGVLNPYQLTDQFTSFAKMGTQSGFLFYVPAPYTSKIDPLTGFVDPFVWKTIKNHESRKHFLEGFDFLHYDVKTGDFILHFKMNRNLSFQRGLPGFMPAWDIVFEKNETQFDAKGTPFIAGKRIVPVIENHRFTGRYRDLYPANELIALLEEKGIVFRDGSNILPKLLENDDSHAIDTMVALIRSVLQMRNSNAATGEDYINSPVRDLNGVCFDSRFQNPEWPMDADANGAYHIALKGQLLLNHLKESKDLKLQNGISNQDWLAYIQELRN

SEQ ID NO: 151 - protein, 1107 aa, Bacillus hisashii
ATRSFILKIEPNEEVKKGLWKTHEVLNHGIAYYMNILKLIRQEAIYEHHEQDPKNPKKVSKAEIQAELWDFVLKMQKCNSFTHEVDKDEVFNILRELYEELVPSSVEKKGEANQLSNKFLYPLVDPNSQSGKGTASSGRKPRWYNLKIAGDPSWEEEKKKWEEDKKKDPLAKILGKLAEYGLIPLFIPYTDSNEPIVKEIKWMEKSRNQSVRRLDKDMFIQALERFLSWESWNLKVKEEYEKVEKEYKTLEERIKEDIQALKALEQYEKERQEQLLRDTLNTNEYRLSKRGLRGWREIIQKWLKMDENEPSEKYLEVFKDYQRKHPREAGDYSVYEFLSKKENHFIWRNHPEYPYLYATFCEIDKKKKDAKQQATFTLADPINHPLWVRFEERSGSNLNKYRILTEQLHTEKLKKKLTVQLDRLIYPTESGGWEEKGKVDIVLLPSRQFYNQIFLDIEEKGKHAFTYKDESIKFPLKGTLGGARVQFDRDHLRRYPHKVESGNVGRIYFNMTVNIEPTESPVSKSLKIHRDDFPKVVNFKPKELTEWIKDSKGKKLKSGIESLEIGLRVMSIDLGQRQAAAASIFEVVDQKPDIEGKLFFPIKGTELYAVHRASFNIKLPGETLVKSREVLRKAREDNLKLMNQKLNFLRNVLHFQQFEDITEREKRVTKWISRQENSDVPLVYQDELIQIRELMYKPYKDWVAFLKQLHKRLEVEIGKEVKHWRKSLSDGRKGLYGISLKNIDEIDRTRKFLLRWSLRPTEPGEVRRLEPGQRFAIDQLNHLNALKEDRLKKMANTIIMHALGYCYDVRKKKWQAKNPACQIILFEDLSNYNPYGERSRFENSRLMKWSRREIPRQVALQGEIYGLQVGEVGAQFSSRFHAKTGSPGIRCRVVTKEKLQDNRFFKNLQREGRLTLDKIAVLKEGDLYPDKGGEKFISLSKDRKCVTTHADINAAQNLQKRFWTRTHGFYKVYCKAYQVDGQTVYIPESKDQKQKIIEEFGEGYFILKDGVYEWVNAGKLKIKKGSSKQSSSELVDSDILKDSFDLASELKGEKLMLYRDPSGNVFPSDKWMAAGVFFGKLERILISKLTNQYSISTIEDDSSKQSM

SEQ ID NO: 152 - protein, 46 aa, Homo sapiens
MGIINTLQKYYCRVRGGRCAVLSCLPKEEQIGKCSTRGRKCCRRKK

SEQ ID NO: 153 - protein, 90 aa, Grapevine virus A
MDDPSFLTGRSTYAKRRRARRMNVCKCGAILHNNKDCRSSTISGHKLDRLRFVKEGRVALEGETPVYRTWVKWVETEYHINILETSDDEE

SEQ ID NO: 154 - DNA, 6048 bp, Artificial sequence
  Synthetic N-terminally fused REDRAW editor
atggcaacttcaagaaagaggcctagtgacttggttcacgtattctctcctccacgaaagaaggctggttcggctacatcaagaaagcgtcccagcgatttagtgcatgtcttctctccgccaagaaagaaggccggatccactctcaatatcgaagacgaacatcgtttacatgaaacatctaaagaaccggacgtttctttaggttccacatggttaagcgacttccctcaggcctgggcagaaacaggtggtatgggacttgccgttcgacaagcgcctttgatcatacccctaaaggcgacaagtaccccagtatccattaaacagtatcctatgtcccaggaggcacgcttggggataaagccccatatccaaagactattagatcaggggatacttgtcccatgccaaagcccttggaacactccgttactgcccgtgaaaaaaccaggtacaaacgattatagacctgtgcaagacctgcgcgaggtgaacaagagggtagaggatatacatccaacggttccaaatccttataatttactatctggtcttccacctagtcaccagtggtataccgtcttggacttgaaggatgcgtttttctgcttgcgtttacatccgacgtctcaacctttattcgcattcgagtggcgagatcctgagatgggtatctctggtcagttaacttggacaagattgcctcaaggttttaagaatagtccaactttatttaatgaagccttgcatagagatttggctgattttaggattcaacatcctgacctaattttgctacaatacgttgatgatctattgttggctgccacctcggaacttgattgtcaacagggtacgagggctctgcttcaaaccttaggaaacttgggataccgagcttctgctaaaaaggcgcaaatttgtcaaaagcaggtaaaatacttgggttacctattgaaagaagggcaaaggtggctaactgaggcccgtaaagaaaccgtgatgggtcaaccaacccccaaaacaccaagacaactcagggaatttttaggcaaagcgggtttctgtagattgtttattcctggctttgcagaaatggccgcaccactgtatccactgacaaaaccaggcaccttgttcaactggggcccagatcagcagaaggcttatcaagaaattaaacaggctttgctaacagcaccagcactaggtctaccagatttaactaaacccttcgaattgtttgttgatgaaaaacaaggatatgctaaaggtgtcctgactcaaaaattgggaccctggagaagaccggttgcatatttaagcaaaaagttggacccagtagccgctgggtggccaccgtgtttaaggatggttgctgctatcgctgtcttaacgaaggatgccggcaaattaacgatgggacagccactggttatactagctccccatgctgttgaagccttggtgaaacaacctcccgaccgttggttatcaaatgcaagaatgacacactatcaagccttgttgctcgacacagacagagttcaatttggacctgtagtcgcactaaatccggcgactcttttaccactgccagaagagggtcttcaacataactgcctcgatattttggccgaagctcatgggaccagaccggacttaacagatcaacctttaccagatgcagatcacacttggtacactgatggtagttcactccttcaagagggtcaacgtaaagctggcgcagcagttaccactgaaacggaagtaatttgggcaaaagcattacctgctggtacttcagcccaaagagctgagttgattgccttgactcaagctcttaaaatggctgaaggcaagaagctgaatgtctatactgactcaagatacgcttttgctactgctcatattcacggtgaaatctacagaagaagaggatggcttacgagtgaaggaaaagaaattaagaataaggatgagatattagcacttctcaaagcattgtttctgccaaagagactttcaattattcactgtccaggacatcaaaagggccactccgccgaagctaggggtaatagaatggcagatcaggcagcgaggaaggctgccatcacagagactcctgatacatctaccttattaatagaaaactcgtcgccaaattcacggttaataaactcaggtggatcgtccggtggcagttctggttcagaaactcctggtacatctgagagcgctaccccagaatccagtggagggagctcagggggttctagcaaactcgaaaagttcactaattgttactctctatcaaagaccttaagatttaaggctatacctgtagggaagactcaagaaaacatcgataataagaggttgttagttgaagatgaaaagagggctgaagactacaagggtgtaaagaaattgttggaccgatactaccttagcttcatcaacgatgtcttgcattcaataaagttgaaaaatttaaataactacatctcgctattccgtaagaaaacgaggaccgaaaaggagaacaaagaactagaaaacttggaaatcaacctgagaaaggagatagccaaagccttcaagggtaatgagggttacaagtctctttttaagaaagatattatcgaaactatactaccagaattcttagatgacaaagacgagatcgccctggtaaactcttttaatggtttcacaactgcgttcacaggtttctttgacaatcgcgagaatatgttctctgaagaggctaagagtacatcaatcgcattcaggtgcatcaacgaaaacttgacgaggtacatttcgaacatggacatatttgaaaaggttgacgcaatcttcgacaagcatgaagtacaagaaatcaaggaaaagatcttaaattcggattacgatgtggaggatttcttcgaaggtgaattctttaacttcgtcttgacccaagagggtatcgatgtctacaatgcaatcataggaggtttcgttaccgaatccggcgagaagatcaaaggtctaaacgaatatatcaatctgtataatcaaaagaccaagcagaaactacccaaattcaagcctctctacaagcaagtcttgtcagacagggaatccctatccttctacggcgaaggatacacctctgatgaagaggtgttggaggtcttccgtaatactttgaataagaactcagaaatcttttcctctataaagaaactagagaaattattcaagaatttcgacgaatactctagtgcaggcatcttcgtgaagaatggtcctgctataagcacaatctctaaagatatcttcggggaatggaatgtcatccgagataagtggaatgcggaatacgatgatatccacttaaagaaaaaggcagttgtaaccgaaaaatacgaagatgacaggcgtaagtcattcaagaagatcggatcattcagtctcgaacagttacaagagtacgccgacgctgacctttctgtcgtggaaaagctaaaagagattatcatacagaaagttgatgaaatatataaggtctatggttcatcagaaaagttgttcgatgctgatttcgtattagaaaagagtttaaagaaaaacgacgctgtagtggcaatcatgaaggatttattggacagtgtcaagtcatttgaaaattacatcaaggcattcttcggtgaaggtaaggaaacaaaccgcgatgagtccttctacggagatttcgtgttggcctatgacatcctattaaaggtggatcacatctatgatgctatccgtaattatgtcacacagaaaccctactctaaggacaagttcaagttgtacttccagaacccacaatttatgggtggttgggataaggataaggaaactgactacagagcaactatcttaaggtatggttcaaagtactatctcgctatcatggacaagaaatacgctaagtgtctacaaaagatcgacaaagatgatgtcaatggtaattacgagaagatcaattacaaattactaccaggaccaaataagatgcttccgaaggtgttcttttcaaagaagtggatggcgtattacaaccctagtgaagacatccagaagatatataagaatgggaccttcaaaaagggagatatgttcaatctgaatgattgtcacaaattaatcgatttctttaaggacagtatctccagatacccgaagtggtcaaatgcttacgattttaacttctcggaaacagagaagtacaaagacatcgctggtttctacagagaagtggaggagcagggttacaaggtgtcattcgaaagtgcaagcaagaaggaggtagataagctggtagaggagggcaagttgtatatgtttcaaatctataacaaggatttctcggataagtctcacggaacaccaaacttacatactatgtactttaagctcctgttcgatgaaaacaatcatgggcaaatcagattatctggtggtgctgaattgttcatgagacgtgcaagtttaaagaaggaggaattggttgtcgctccagcaaatagcccaatcgcgaataagaatccagacaacccaaagaaaacgacgacgttgtcgtacgatgtttacaaggataagagattctcagaagatcaatatgagctgcatatccctatcgcaatcaataagtgtcctaagaacattttcaagattaacactgaagttagagtgctactcaagcatgatgataacccctacgttatcggcatagatagaggcgagaggaatttgttatacatcgtcgtggtggatggcaagggaaacatcgttgagcagtattctcttaatgaaattatcaataatttcaatggaattagaatcaaaactgattatcactccctgttggacaagaaggaaaaggaaagattcgaagctagacagaactggacttccattgaaaacattaaagagctaaaggctggttatatctcccaagttgttcataagatctgcgagttagtggaaaagtatgatgctgtaatcgcccttgaagatcttaactctggtttcaagaattcaagagtcaaggttgaaaagcaagtgtaccagaaatttgagaagatgctgatagacaaattgaattacatggtagataagaagtccaatccatgtgccaccgggggagccttaaaggggtatcagatcacaaacaagttcgaatctttcaagtcgatgagcacacagaatgggtttatattctacattccggcctggttaacttctaagattgatcccagcaccggcttcgttaatctgttgaagactaagtacacgtctatcgccgacagcaagaagttcatctctagctttgatagaattatgtacgttccagaagaagatctgttcgaattcgctcttgactacaagaacttctctcggacagatgcagattacatcaagaaatggaagttgtatagttacggcaatagaatccgtatcttccgtaaccctaagaagaacaacgtcttcgattgggaagaagtttgcttaacatccgcatacaaggaactgtttaataagtacggaatcaattaccaacaaggtgatattcgagcactgttgtgtgaacaatctgacaaggctttctattcgagtttcatggcattaatgtcactgatgttgcaaatgcggaatagtatcactggtagaactgatgtggatttccttatcagtcctgttaagaactctgatggaattttctatgactccaggaattacgaagcccaagaaaatgctatccttcctaagaatgcggacgctaacggcgcttacaatattgcaagaaaggtgttgtgggccataggtcagttcaagaaggccgaagatgaaaagttagataaggtaaagattgcgatcagtaataaggagtggttggaatacgcccaaacatccgttaagcatggtagttcaggaggtagcaagaggactgctgatgggtctgaattcgagccaaagaagaagagaaaggttggctccggttaa

SEQ ID NO: 155 - protein, 2015 aa, Artificial sequence
  Synthetic N-terminally fused REDRAW editor
MATSRKRPSDLVHVFSPPRKKAGSATSRKRPSDLVHVFSPPRKKAGSTLNIEDEHRLHETSKEPDVSLGSTWLSDFPQAWAETGGMGLAVRQAPLIIPLKATSTPVSIKQYPMSQEARLGIKPHIQRLLDQGILVPCQSPWNTPLLPVKKPGTNDYRPVQDLREVNKRVEDIHPTVPNPYNLLSGLPPSHQWYTVLDLKDAFFCLRLHPTSQPLFAFEWRDPEMGISGQLTWTRLPQGFKNSPTLFNEALHRDLADFRIQHPDLILLQYVDDLLLAATSELDCQQGTRALLQTLGNLGYRASAKKAQICQKQVKYLGYLLKEGQRWLTEARKETVMGQPTPKTPRQLREFLGKAGFCRLFIPGFAEMAAPLYPLTKPGTLFNWGPDQQKAYQEIKQALLTAPALGLPDLTKPFELFVDEKQGYAKGVLTQKLGPWRRPVAYLSKKLDPVAAGWPPCLRMVAAIAVLTKDAGKLTMGQPLVILAPHAVEALVKQPPDRWLSNARMTHYQALLLDTDRVQFGPVVALNPATLLPLPEEGLQHNCLDILAEAHGTRPDLTDQPLPDADHTWYTDGSSLLQEGQRKAGAAVTTETEVIWAKALPAGTSAQRAELIALTQALKMAEGKKLNVYTDSRYAFATAHIHGEIYRRRGWLTSEGKEIKNKDEILALLKALFLPKRLSIIHCPGHQKGHSAEARGNRMADQAARKAAITETPDTSTLLIENSSPNSRLINSGGSSGGSSGSETPGTSESATPESSGGSSGGSSKLEKFTNCYSLSKTLRFKAIPVGKTQENIDNKRLLVEDEKRAEDYKGVKKLLDRYYLSFINDVLHSIKLKNLNNYISLFRKKTRTEKENKELENLEINLRKEIAKAFKGNEGYKSLFKKDIIETILPEFLDDKDEIALVNSFNGFTTAFTGFFDNRENMFSEEAKSTSIAFRCINENLTRYISNMDIFEKVDAIFDKHEVQEIKEKILNSDYDVEDFFEGEFFNFVLTQEGIDVYNAIIGGFVTESGEKIKGLNEYINLYNQKTKQKLPKFKPLYKQVLSDRESLSFYGEGYTSDEEVLEVFRNTLNKNSEIFSSIKKLEKLFKNFDEYSSAGIFVKNGPAISTISKDIFGEWNVIRDKWNAEYDDIHLKKKAVVTEKYEDDRRKSFKKIGSFSLEQLQEYADADLSVVEKLKEIIIQKVDEIYKVYGSSEKLFDADFVLEKSLKKNDAVVAIMKDLLDSVKSFENYIKAFFGEGKETNRDESFYGDFVLAYDILLKVDHIYDAIRNYVTQKPYSKDKFKLYFQNPQFMGGWDKDKETDYRATILRYGSKYYLAIMDKKYAKCLQKIDKDDVNGNYEKINYKLLPGPNKMLPKVFFSKKWMAYYNPSEDIQKIYKNGTFKKGDMFNLNDCHKLIDFFKDSISRYPKWSNAYDFNFSETEKYKDIAGFYREVEEQGYKVSFESASKKEVDKLVEEGKLYMFQIYNKDFSDKSHGTPNLHTMYFKLLFDENNHGQIRLSGGAELFMRRASLKKEELVVAPANSPIANKNPDNPKKTTTLSYDVYKDKRFSEDQYELHIPIAINKCPKNIFKINTEVRVLLKHDDNPYVIGIDRGERNLLYIVVVDGKGNIVEQYSLNEIINNFNGIRIKTDYHSLLDKKEKERFEARQNWTSIENIKELKAGYISQVVHKICELVEKYDAVIALEDLNSGFKNSRVKVEKQVYQKFEKMLIDKLNYMVDKKSNPCATGGALKGYQITNKFESFKSMSTQNGFIFYIPAWLTSKIDPSTGFVNLLKTKYTSIADSKKFISSFDRIMYVPEEDLFEFALDYKNFSRTDADYIKKWKLYSYGNRIRIFRNPKKNNVFDWEEVCLTSAYKELFNKYGINYQQGDIRALLCEQSDKAFYSSFMALMSLMLQMRNSITGRTDVDFLISPVKNSDGIFYDSRNYEAQENAILPKNADANGAYNIARKVLWAIGQFKKAEDEKLDKVKIAISNKEWLEYAQTSVKHGSSGGSKRTADGSEFEPKKKRKVGSG

SEQ ID NO: 156 - DNA, 6048 bp, Artificial sequence
  Synthetic C-terminally fused REDRAW Editor
atggcaacttcaagaaagaggcctagtgacttggttcacgtattctctcctccacgaaagaaggctggttcggctacatcaagaaagcgtcccagcgatttagtgcatgtcttctctccgccaagaaagaaggccggatccagcaaactcgaaaagttcactaattgttactctctatcaaagaccttaagatttaaggctatacctgtagggaagactcaagaaaacatcgataataagaggttgttagttgaagatgaaaagagggctgaagactacaagggtgtaaagaaattgttggaccgatactaccttagcttcatcaacgatgtcttgcattcaataaagttgaaaaatttaaataactacatctcgctattccgtaagaaaacgaggaccgaaaaggagaacaaagaactagaaaacttggaaatcaacctgagaaaggagatagccaaagccttcaagggtaatgagggttacaagtctctttttaagaaagatattatcgaaactatactaccagaattcttagatgacaaagacgagatcgccctggtaaactcttttaatggtttcacaactgcgttcacaggtttctttgacaatcgcgagaatatgttctctgaagaggctaagagtacatcaatcgcattcaggtgcatcaacgaaaacttgacgaggtacatttcgaacatggacatatttgaaaaggttgacgcaatcttcgacaagcatgaagtacaagaaatcaaggaaaagatcttaaattcggattacgatgtggaggatttcttcgaaggtgaattctttaacttcgtcttgacccaagagggtatcgatgtctacaatgcaatcataggaggtttcgttaccgaatccggcgagaagatcaaaggtctaaacgaatatatcaatctgtataatcaaaagaccaagcagaaactacccaaattcaagcctctctacaagcaagtcttgtcagacagggaatccctatccttctacggcgaaggatacacctctgatgaagaggtgttggaggtcttccgtaatactttgaataagaactcagaaatcttttcctctataaagaaactagagaaattattcaagaatttcgacgaatactctagtgcaggcatcttcgtgaagaatggtcctgctataagcacaatctctaaagatatcttcggggaatggaatgtcatccgagataagtggaatgcggaatacgatgatatccacttaaagaaaaaggcagttgtaaccgaaaaatacgaagatgacaggcgtaagtcattcaagaagatcggatcattcagtctcgaacagttacaagagtacgccgacgctgacctttctgtcgtggaaaagctaaaagagattatcatacagaaagttgatgaaatatataaggtctatggttcatcagaaaagttgttcgatgctgatttcgtattagaaaagagtttaaagaaaaacgacgctgtagtggcaatcatgaaggatttattggacagtgtcaagtcatttgaaaattacatcaaggcattcttcggtgaaggtaaggaaacaaaccgcgatgagtccttctacggagatttcgtgttggcctatgacatcctattaaaggtggatcacatctatgatgctatccgtaattatgtcacacagaaaccctactctaaggacaagttcaagttgtacttccagaacccacaatttatgggtggttgggataaggataaggaaactgactacagagcaactatcttaaggtatggttcaaagtactatctcgctatcatggacaagaaatacgctaagtgtctacaaaagatcgacaaagatgatgtcaatggtaattacgagaagatcaattacaaattactaccaggaccaaataagatgcttccgaaggtgttcttttcaaagaagtggatggcgtattacaaccctagtgaagacatccagaagatatataagaatgggaccttcaaaaagggagatatgttcaatctgaatgattgtcacaaattaatcgatttctttaaggacagtatctccagatacccgaagtggtcaaatgcttacgattttaacttctcggaaacagagaagtacaaagacatcgctggtttctacagagaagtggaggagcagggttacaaggtgtcattcgaaagtgcaagcaagaaggaggtagataagctggtagaggagggcaagttgtatatgtttcaaatctataacaaggatttctcggataagtctcacggaacaccaaacttacatactatgtactttaagctcctgttcgatgaaaacaatcatgggcaaatcagattatctggtggtgctgaattgttcatgagacgtgcaagtttaaagaaggaggaattggttgtcgctccagcaaatagcccaatcgcgaataagaatccagacaacccaaagaaaacgacgacgttgtcgtacgatgtttacaaggataagagattctcagaagatcaatatgagctgcatatccctatcgcaatcaataagtgtcctaagaacattttcaagattaacactgaagttagagtgctactcaagcatgatgataacccctacgttatcggcatagatagaggcgagaggaatttgttatacatcgtcgtggtggatggcaagggaaacatcgttgagcagtattctcttaatgaaattatcaataatttcaatggaattagaatcaaaactgattatcactccctgttggacaagaaggaaaaggaaagattcgaagctagacagaactggacttccattgaaaacattaaagagctaaaggctggttatatctcccaagttgttcataagatctgcgagttagtggaaaagtatgatgctgtaatcgcccttgaagatcttaactctggtttcaagaattcaagagtcaaggttgaaaagcaagtgtaccagaaatttgagaagatgctgatagacaaattgaattacatggtagataagaagtccaatccatgtgccaccgggggagccttaaaggggtatcagatcacaaacaagttcgaatctttcaagtcgatgagcacacagaatgggtttatattctacattccggcctggttaacttctaagattgatcccagcaccggcttcgttaatctgttgaagactaagtacacgtctatcgccgacagcaagaagttcatctctagctttgatagaattatgtacgttccagaagaagatctgttcgaattcgctcttgactacaagaacttctctcggacagatgcagattacatcaagaaatggaagttgtatagttacggcaatagaatccgtatcttccgtaaccctaagaagaacaacgtcttcgattgggaagaagtttgcttaacatccgcatacaaggaactgtttaataagtacggaatcaattaccaacaaggtgatattcgagcactgttgtgtgaacaatctgacaaggctttctattcgagtttcatggcattaatgtcactgatgttgcaaatgcggaatagtatcactggtagaactgatgtggatttccttatcagtcctgttaagaactctgatggaattttctatgactccaggaattacgaagcccaagaaaatgctatccttcctaagaatgcggacgctaacggcgcttacaatattgcaagaaaggtgttgtgggccataggtcagttcaagaaggccgaagatgaaaagttagataaggtaaagattgcgatcagtaataaggagtggttggaatacgcccaaacatccgttaagcattcaggtggatcgtccggtggcagttctggttcagaaactcctggtacatctgagagcgctaccccagaatccagtggagggagctcagggggttctactctcaatatcgaagacgaacatcgtttacatgaaacatctaaagaaccggacgtttctttaggttccacatggttaagcgacttccctcaggcctgggcagaaacaggtggtatgggacttgccgttcgacaagcgcctttgatcatacccctaaaggcgacaagtaccccagtatccattaaacagtatcctatgtcccaggaggcacgcttggggataaagccccatatccaaagactattagatcaggggatacttgtcccatgccaaagcccttggaacactccgttactgcccgtgaaaaaaccaggtacaaacgattatagacctgtgcaagacctgcgcgaggtgaacaagagggtagaggatatacatccaacggttccaaatccttataatttactatctggtcttccacctagtcaccagtggtataccgtcttggacttgaaggatgcgtttttctgcttgcgtttacatccgacgtctcaacctttattcgcattcgagtggcgagatcctgagatgggtatctctggtcagttaacttggacaagattgcctcaaggttttaagaatagtccaactttatttaatgaagccttgcatagagatttggctgattttaggattcaacatcctgacctaattttgctacaatacgttgatgatctattgttggctgccacctcggaacttgattgtcaacagggtacgagggctctgcttcaaaccttaggaaacttgggataccgagcttctgctaaaaaggcgcaaatttgtcaaaagcaggtaaaatacttgggttacctattgaaagaagggcaaaggtggctaactgaggcccgtaaagaaaccgtgatgggtcaaccaacccccaaaacaccaagacaactcagggaatttttaggcaaagcgggtttctgtagattgtttattcctggctttgcagaaatggccgcaccactgtatccactgacaaaaccaggcaccttgttcaactggggcccagatcagcagaaggcttatcaagaaattaaacaggctttgctaacagcaccagcactaggtctaccagatttaactaaacccttcgaattgtttgttgatgaaaaacaaggatatgctaaaggtgtcctgactcaaaaattgggaccctggagaagaccggttgcatatttaagcaaaaagttggacccagtagccgctgggtggccaccgtgtttaaggatggttgctgctatcgctgtcttaacgaaggatgccggcaaattaacgatgggacagccactggttatactagctccccatgctgttgaagccttggtgaaacaacctcccgaccgttggttatcaaatgcaagaatgacacactatcaagccttgttgctcgacacagacagagttcaatttggacctgtagtcgcactaaatccggcgactcttttaccactgccagaagagggtcttcaacataactgcctcgatattttggccgaagctcatgggaccagaccggacttaacagatcaacctttaccagatgcagatcacacttggtacactgatggtagttcactccttcaagagggtcaacgtaaagctggcgcagcagttaccactgaaacggaagtaatttgggcaaaagcattacctgctggtacttcagcccaaagagctgagttgattgccttgactcaagctcttaaaatggctgaaggcaagaagctgaatgtctatactgactcaagatacgcttttgctactgctcatattcacggtgaaatctacagaagaagaggatggcttacgagtgaaggaaaagaaattaagaataaggatgagatattagcacttctcaaagcattgtttctgccaaagagactttcaattattcactgtccaggacatcaaaagggccactccgccgaagctaggggtaatagaatggcagatcaggcagcgaggaaggctgccatcacagagactcctgatacatctaccttattaatagaaaactcgtcgccaaattcacggttaataaacggtagttcaggaggtagcaagaggactgctgatgggtctgaattcgagccaaagaagaagagaaaggttggctccggttaa

SEQ ID NO: 157 - protein, 2015 aa, Artificial sequence
  Synthetic C-terminally fused REDRAW Editor
MATSRKRPSDLVHVFSPPRKKAGSATSRKRPSDLVHVFSPPRKKAGSSKLEKFTNCYSLSKTLRFKAIPVGKTQENIDNKRLLVEDEKRAEDYKGVKKLLDRYYLSFINDVLHSIKLKNLNNYISLFRKKTRTEKENKELENLEINLRKEIAKAFKGNEGYKSLFKKDIIETILPEFLDDKDEIALVNSFNGFTTAFTGFFDNRENMFSEEAKSTSIAFRCINENLTRYISNMDIFEKVDAIFDKHEVQEIKEKILNSDYDVEDFFEGEFFNFVLTQEGIDVYNAIIGGFVTESGEKIKGLNEYINLYNQKTKQKLPKFKPLYKQVLSDRESLSFYGEGYTSDEEVLEVFRNTLNKNSEIFSSIKKLEKLFKNFDEYSSAGIFVKNGPAISTISKDIFGEWNVIRDKWNAEYDDIHLKKKAVVTEKYEDDRRKSFKKIGSFSLEQLQEYADADLSVVEKLKEIIIQKVDEIYKVYGSSEKLFDADFVLEKSLKKNDAVVAIMKDLLDSVKSFENYIKAFFGEGKETNRDESFYGDFVLAYDILLKVDHIYDAIRNYVTQKPYSKDKFKLYFQNPQFMGGWDKDKETDYRATILRYGSKYYLAIMDKKYAKCLQKIDKDDVNGNYEKINYKLLPGPNKMLPKVFFSKKWMAYYNPSEDIQKIYKNGTFKKGDMFNLNDCHKLIDFFKDSISRYPKWSNAYDFNFSETEKYKDIAGFYREVEEQGYKVSFESASKKEVDKLVEEGKLYMFQIYNKDFSDKSHGTPNLHTMYFKLLFDENNHGQIRLSGGAELFMRRASLKKEELVVAPANSPIANKNPDNPKKTTTLSYDVYKDKRFSEDQYELHIPIAINKCPKNIFKINTEVRVLLKHDDNPYVIGIDRGERNLLYIVVVDGKGNIVEQYSLNEIINNFNGIRIKTDYHSLLDKKEKERFEARQNWTSIENIKELKAGYISQVVHKICELVEKYDAVIALEDLNSGFKNSRVKVEKQVYQKFEKMLIDKLNYMVDKKSNPCATGGALKGYQITNKFESFKSMSTQNGFIFYIPAWLTSKIDPSTGFVNLLKTKYTSIADSKKFISSFDRIMYVPEEDLFEFALDYKNFSRTDADYIKKWKLYSYGNRIRIFRNPKKNNVFDWEEVCLTSAYKELFNKYGINYQQGDIRALLCEQSDKAFYSSFMALMSLMLQMRNSITGRTDVDFLISPVKNSDGIFYDSRNYEAQENAILPKNADANGAYNIARKVLWAIGQFKKAEDEKLDKVKIAISNKEWLEYAQTSVKHSGGSSGGSSGSETPGTSESATPESSGGSSGGSTLNIEDEHRLHETSKEPDVSLGSTWLSDFPQAWAETGGMGLAVRQAPLIIPLKATSTPVSIKQYPMSQEARLGIKPHIQRLLDQGILVPCQSPWNTPLLPVKKPGTNDYRPVQDLREVNKRVEDIHPTVPNPYNLLSGLPPSHQWYTVLDLKDAFFCLRLHPTSQPLFAFEWRDPEMGISGQLTWTRLPQGFKNSPTLFNEALHRDLADFRIQHPDLILLQYVDDLLLAATSELDCQQGTRALLQTLGNLGYRASAKKAQICQKQVKYLGYLLKEGQRWLTEARKETVMGQPTPKTPRQLREFLGKAGFCRLFIPGFAEMAAPLYPLTKPGTLFNWGPDQQKAYQEIKQALLTAPALGLPDLTKPFELFVDEKQGYAKGVLTQKLGPWRRPVAYLSKKLDPVAAGWPPCLRMVAAIAVLTKDAGKLTMGQPLVILAPHAVEALVKQPPDRWLSNARMTHYQALLLDTDRVQFGPVVALNPATLLPLPEEGLQHNCLDILAEAHGTRPDLTDQPLPDADHTWYTDGSSLLQEGQRKAGAAVTTETEVIWAKALPAGTSAQRAELIALTQALKMAEGKKLNVYTDSRYAFATAHIHGEIYRRRGWLTSEGKEIKNKDEILALLKALFLPKRLSIIHCPGHQKGHSAEARGNRMADQAARKAAITETPDTSTLLIENSSPNSRLINGSSGGSKRTADGSEFEPKKKRKVGSG

SEQ ID NO: 158 - DNA, 37 bp, Artificial sequence
  Synthetic oligonucleotide
cgcggttctatctagttacgcgttaaaccaactagaa

SEQ ID NO: 159 - DNA, 23 bp, Artificial sequence
  Synthetic oligonucleotide
gcatacgatggaagaggtaactt

SEQ ID NO: 160 - DNA, 23 bp, Artificial sequence
  Synthetic oligonucleotide
gcatacgattaaagaggtaactt

SEQ ID NO: 161 - DNA, 23 bp, Artificial sequence
  Synthetic oligonucleotide
caaatagtcctctttcaacaata

SEQ ID NO: 162 - DNA, 48 bp, Artificial sequence
  Synthetic oligonucleotide
cgttgtaaagaataaggaaatgattccggaagctttggaagtactgaa

SEQ ID NO: 163 - DNA, 48 bp, Artificial sequence
  Synthetic oligonucleotide
ataatgtcagatcctgtagagaccacatcatccacggttctatactgt

SEQ ID NO: 164 - DNA, 40 bp, Artificial sequence
  Synthetic oligonucleotide
tgaagtcgaggactttggcatacgatggaagaggtaactt

SEQ ID NO: 165 - DNA, 50 bp, Artificial sequence
  Synthetic oligonucleotide
ccattcgtcttgaagtcgaggactttggcatacgatggaagaggtaactt

SEQ ID NO: 166 - DNA, 72 bp, Artificial sequence
  Synthetic oligonucleotide
tgttggaagagatttgggttttccattcgtcttgaagtcgaggactttggcatacgatggaagaggtaactt

SEQ ID NO: 167 - DNA, 47 bp, Artificial sequence
  Synthetic oligonucleotide
ctaccttagcatcccttccctttgcaaatagtcctctctcaacaata

SEQ ID NO: 168 - DNA, 55 bp, Artificial sequence
  Synthetic oligonucleotide
ttcaccctctaccttagcatcccttccctttgcaaatagtcctctctcaacaata

SEQ ID NO: 169 - DNA, 63 bp, Artificial sequence
  Synthetic oligonucleotide
ctgtaacgttcaccctctaccttagcatcccttccctttgcaaatagtcctctctcaacaata

SEQ ID NO: 170 - DNA, 21 bp, Artificial sequence
  Synthetic LbCas12a crRNA scaffold
taatttctactaagtgtagat

SEQ ID NO: 171 - DNA, 23 bp, Artificial sequence
  Synthetic oligonucleotide
cctcactcctgctcggtgaattt

SEQ ID NO: 172 - protein, 683 aa, Moloney Murine Leukemia Virus; identical to SEQ ID NO: 53

SEQ ID NO: 173 - DNA, 122 bp, Artificial sequence
  Synthetic oligonucleotide
acagcaggcctttggtcaggttggctgctgggctggccctggggccgtaaccctcactcctgctcggtgaatttggctcagcaggcacctgcctcagctgctcacttgagcctctgggtcta

SEQ ID NO: 174 - DNA, 100 bp, Artificial sequence
  Synthetic oligonucleotide
ggctgctgggctggccctggggccgtaaccctcactcctgctcggtgaatttggctcagcaggcacctgcctcagctgctcacttgagcctctgggtcta

SEQ ID NO: 175 - DNA, 92 bp, Artificial sequence
  Synthetic oligonucleotide
ggctggccctggggccgtaaccctcactcctgctcggtgaatttggctcagcaggcacctgcctcagctgctcacttgagcctctgggtcta

SEQ ID NO: 176 - DNA, 84 bp, Artificial sequence
  Synthetic oligonucleotide
ctggggccgtaaccctcactcctgctcggtgaatttggctcagcaggcacctgcctcagctgctcacttgagcctctgggtcta

SEQ ID NO: 177 - DNA, 122 bp, Artificial sequence
  Synthetic oligonucleotide
acagcaggcctttggtcaggttggctgctgggctggccctggggccgtttccctcactcctggacggtgaatttggctcagcaggcacctgcctcagctgctcacttgagcctctgggtcta

SEQ ID NO: 178 - DNA, 122 bp, Artificial sequence
  Synthetic oligonucleotide
acagcaggcctttggtcaggttggctgctgggctggccctggggccgtttccctcactcctgctgcgtgaatttggctcagcaggcacctgcctcagctgctcacttgagcctctgggtcta

SEQ ID NO: 179 - DNA, 100 bp, Artificial sequence
  Synthetic oligonucleotide
aatagcattgcagagaggcgtatcatttcgcggatgttggaatcagtacgcagagagtcgccgtctccaaggtgaaagcggaagtagggccttcgcgcac

SEQ ID NO: 180 - DNA, 100 bp, Artificial sequence
  Synthetic oligonucleotide
aatagcattgcagagaggcgtatcatttcgcggatgttcctttcagtacgcagagagtcgccgtctccaaggtgaaagcggaagtagggccttcgcgcac

SEQ ID NO: 181 - DNA, 122 bp, Artificial sequence; identical to SEQ ID NO: 173
  Synthetic oligonucleotide

SEQ ID NO: 182 - DNA, 100 bp, Artificial sequence; identical to SEQ ID NO: 174
  Synthetic oligonucleotide

SEQ ID NO: 183 - DNA, 92 bp, Artificial sequence; identical to SEQ ID NO: 175
  Synthetic oligonucleotide

SEQ ID NO: 184 - DNA, 84 bp, Artificial sequence; identical to SEQ ID NO: 176
  Synthetic oligonucleotide

SEQ ID NO: 185 - DNA, 122 bp, Artificial sequence
  Synthetic oligonucleotide
gcactctgccacttattgggtcagctgttaacatcagtacgttaatgtaacctgatggtccatgtctgttactcgcctgtcaagtggcgtgacaccgggcgtgttccccagagtgacttttc

SEQ ID NO: 186 - DNA, 100 bp, Artificial sequence
  Synthetic oligonucleotide
agctgttaacatcagtacgttaatgtaacctgatggtccatgtctgttactcgcctgtcaagtggcgtgacaccgggcgtgttccccagagtgacttttc

SEQ ID NO: 187 - DNA, 27 bp, Artificial sequence
  Synthetic oligonucleotide
tttggctcactcctgctcggtgaattt

SEQ ID NO: 188 - DNA, 27 bp, Artificial sequence
  Synthetic oligonucleotide
tttcgcgcttgttccaatcagtacgca

SEQ ID NO: 189 - DNA, 20 bp, Acidaminococcus sp.
taatttctactcttgtagat

SEQ ID NO: 190 - DNA, 19 bp, Bacteriophage lambda
gggccctgaagaagggccc

SEQ ID NO: 191 - DNA, 42 bp, Artificial sequence
  Synthetic oligonucleotide
ttgacgcggttctatctagttacgcgttaaaccaacuagaaa

SEQ ID NO: 192 - DNA, 63 bp, Moloney murine leukemia virus
ggaggtcagggtcaggagcccccccctgaacccaggataaccctcaaagtcggggggcaaccc

SEQ ID NO: 193 - DNA, 55 bp, Moloney murine leukemia virus
gggtcaggagcccccccctgaacccaggataaccctcaaagtcggggggcaaccc

SEQ ID NO: 194 - DNA, 34 bp, Bacteriophage MS2
ggccaacatgaggatcacccatgtctgcagggcc

SEQ ID NO: 195 - DNA, 29 bp, Pseudomonas phage PP7
ccggagcagacgatatggcgtcgctccgg

SEQ ID NO: 196 - DNA, 26 bp, Homo sapiens
ccaaaggctcttctcagagccaccca

SEQ ID NO: 197 - DNA, 31 bp, Human immunodeficiency virus
ggccagatctgagcctgggagctctctggcc

SEQ ID NO: 198 - DNA, 36 bp, Tetrahymena thermophila
atataaccttcaccattaggttcaaataatggtaat

SEQ ID NO: 199 - protein, 269 aa, Saccharomyces cerevisiae
DMDSIGESEVRALYKAILKFGNLKEILDELIADGTLPVKSFEKYGETYDEMMEAAKDCVHEEEKNRKEILEKLEKHATAYRAKLKSGEIKAENQPKDNPLTRLSLKKREKKAVLFNFKGVKSLNAESLLSRVEDLKYLKNLINSNYKDDPLKFSLGNNTPKPVQNWSSNWTKEEDEKLLIGVFKYGYGSWTQIRDDPFLGITDKIFLNEVHNPVAKKSASSSDTTPTPSKKGKGITGSSKKVPGAIHLGRRVDYLLSFLRGGLNTKSPS

SEQ ID NO: 200 - protein, 80 aa, Homo sapiens
STDHPKYSDMIVAAIQAEKNRAGSSRQSIQKYIKSHYKVGENADSQIKLSIKRLVTTGVLKQTKGVGASGSFRLAKSDEP

SEQ ID NO: 201 - protein, 83 aa, Homo sapiens
GKGDPKKPRGKMSSYAFFVQTCREEHKKKHPDASVNFSEFSKKCSERWKTMSAKEKGKFEDMAKADKARYEREMKTYIPPKGE

SEQ ID NO: 202 - protein, 100 aa, Papio anubis
MPKRKVSSAEGAAKEEPKRRSARLSAKPPAKVEAKPKKAAAKDKSSDKKVQTKGKRGAKGKQAEVANQETKEDLPAENGETKTEESPASDEAGEKEAKSD

SEQ ID NO: 203 - RNA, 21 nt, Artificial sequence
  Synthetic oligonucleotide
uaagucuccauagaauggagg

SEQ ID NO: 204 - DNA, 102 bp, Artificial sequence
  Synthetic oligonucleotide
gaacgtcacctggaaccgaccttgctggccgtacatttatacggctccgcagtggatggcggctgaaagccacacagtgatattgatttgctggttacggtg

SEQ ID NO: 205 - protein, 21 aa, Artificial sequence
  Synthetic peptide
ERHLEPTLLAVHLYGSAVDGG

SEQ ID NO: 206 - protein, 12 aa, Artificial sequence
  Synthetic peptide
KPHSDIDLLVTV

SEQ ID NO: 207 - DNA, 102 bp, Artificial sequence
  Synthetic oligonucleotide
gaacgtcacctggaaccgaccttgctggccgtacatttatacggctccgcagtggatggcggcctgaagccacacagtgatattgatttgctggttacggtg

SEQ ID NO: 208 - protein, 34 aa, Artificial sequence
  Synthetic peptide
ERHLEPTLLAVHLYGSAVDGGLKPHSDIDLLVTV

SEQ ID NO: 209 - DNA, 98 bp, Artificial sequence
  Synthetic oligonucleotide
catgcccgcaaaaacgtggcgtatgtactcgtgtatatactaccactcctaaaaaaccgaactccgcgctgcgtaaagtatgccgtgttcgtctgact

SEQ ID NO: 210 - protein, 33 aa, Artificial sequence
  Synthetic peptide
ACPQKRGVCTRVYTTTPKKPNSALRKVCRVRLT

SEQ ID NO: 211 - DNA, 98 bp, Artificial sequence
  Synthetic oligonucleotide
catgcccgcaaaaacgtggcgtatgtactcgtgtatatactaccactcctcgtaaaccgaactccgcgctgcgtaaagtatgccgtgttcgtctgact

SEQ ID NO: 212 - DNA, 120 bp, Artificial sequence
  Synthetic oligonucleotide
atttatacggctccgcagtggatggcggcctgaagccacacagtgatattgatttgctggttacggtgaccgtacgcctttgagaaacaacgcgccgcgctttgatcaacgaccttttgg

SEQ ID NO: 213 - protein, 27 aa, Artificial sequence
  Synthetic peptide
HLYGSAVDGGLKPHSDIDLLVTVTVRL

SEQ ID NO: 214 - protein, 12 aa, Artificial sequence
  Synthetic peptide
ETTRRALINDLL

SEQ ID NO: 215 - DNA, 120 bp, Artificial sequence
  Synthetic oligonucleotide
atttatacggctccgcagtggatggcggcctgaagccacacagtgatattgatttgctggttacggtgaccgtacgccttgatgaaacaacgcgccgcgctttgatcaacgaccttttgg

1. A method of modifying a target nucleic acid, the method comprising:
contacting the target nucleic acid with
(a) a Type V CRISPR-Cas effector protein or a Type II CRISPR-Cas effector protein;
(b) a reverse transcriptase, and
(c) an extended guide nucleic acid wherein the extended guide nucleic acid comprises a structured RNA motif, thereby modifying the target nucleic acid.

2-6. (canceled)

7. The method of claim 1, wherein the structured RNA motif is located at the 3′ end of the extended guide nucleic acid.

8. The method of claim 1, wherein the structured RNA motif is AsCpf1BB (SEQ ID NO:189), BoxB (SEQ ID NO:190), pseudoknot (decoy) (SEQ ID NO:95, SEQ ID NO:203), pseudoknot (tEvoPreQ1) (SEQ ID NO:191), fmpknot (SEQ ID NO:192), mpknot (SEQ ID NO:193), MS2 (SEQ ID NO:194), PP7 (SEQ ID NO:195), SLBP (SEQ ID NO:196), TAR (SEQ ID NO:197), and/or ThermoPh (SEQ ID NO:198).

9. The method of claim 1, wherein the structured RNA motif is a pseudoknot.

10. The method of claim 9, wherein the pseudoknot is a tEvoPreQ1 pseudoknot comprising the nucleic acid sequence of SEQ ID NO:158 or an EvoPreQ1 Pseudoknot comprising the nucleic acid sequence of SEQ ID NO:191.

11. The method of claim 9, wherein the pseudoknot comprises the nucleic acid sequenced of SEQ ID NO:95 or SEQ ID NO:203.

12-16. (canceled)

17. The method of claim 1, wherein the extended guide nucleic acid further comprises:
(i) a Type V CRISPR nucleic acid or Type II CRISPR nucleic acid (crRNA, crDNA) and/or a Type V CRISPR nucleic acid or Type II CRISPR nucleic acid and a tracr nucleic acid; and
(ii) an extended portion comprising a primer binding site and a reverse transcriptase template (RT template) (RTT) and the RTT is a length of about 35 nucleotides to about 75 nucleotides and the PBS is a length of about 30 nucleotides to about 80 nucleotides, optionally wherein the PBS is a length of about 8, 16, 24, 32, 40, 48, 56, 64, 72, or 80 nucleotides and the RTT is a length of about 36, 40, 44, 47, 50, 52, 55, 63, 72 or 74 nucleotides.

18-20. (canceled)

21. The method of claim 1, wherein the Type V CRISPR-Cas effector protein or the Type II CRISPR-Cas effector protein is a fusion protein and/or the reverse transcriptase is a fusion protein, wherein the Type V CRISPR-Cas fusion protein or Type II CRISPR-Cas fusion protein, the reverse transcriptase fusion protein and/or the extended guide nucleic acid is fused to one or more components that recruit the reverse transcriptase to the Type V CRISPR-Cas effector protein or Type II CRISPR-Cas effector protein, optionally the one or more components recruit via protein-protein interactions, protein-RNA interactions, and/or chemical interactions, wherein the Type V CRISPR-Cas fusion protein or Type II CRISPR-Cas fusion protein is fused to a chromatin modulating peptide.

22-33. (canceled)

34. The method of claim 21, wherein the chromatin modulating peptide is fused to the C-terminus and/or the N-terminus of the Type V CRISPR-Cas fusion protein or Type II CRISPR-Cas fusion protein.

35. The method of claim 21, wherein the Type V CRISPR-Cas fusion protein or Type II CRISPR-Cas fusion protein is fused at its N-terminus to a reverse transcriptase and the chromatin modulating peptide is fused to the N-terminus of the reverse transcriptase.

36. The method of claim 21, wherein the chromatin modulating peptide is CHD1, H1G, HB1, and HN1.

37. The method of claim 36, wherein CHD1 is SEQ ID NO:199), H1G is SEQ ID NO:200, HB1 is SEQ ID NO:201, and HN1 is SEQ ID NO:202.

38-66. (canceled)

67. The method of claim 1, wherein the reverse transcriptase is fused to one or more single stranded RNA binding domains (RBDs), thereby improving the thermostability, processivity and template affinity of the reverse transcriptase.

68. The method of claim 67, wherein the one or more single stranded RNA binding domains are fused to the N-terminus of the reverse transcriptase, optionally wherein the reverse transcriptase is further fused at its C-terminus to the N-terminus of the Type II CRISPR-Cas effector protein and/or Type V CRISPR-Cas effector protein.

69-75. (canceled)

76. The method of claim 1, further comprising contacting the target nucleic acid with a single stranded DNA binding protein (ssDNA binding protein).

77. The method of claim 76, wherein the ssDNA binding protein is fused to the Type II V CRISPR-Cas effector protein or Type V CRISPR-Cas effector protein.

78. The method of claim 77, wherein the ssDNA binding protein is fused to the C-terminus of the Type II or Type V CRISPR-Cas effector protein.

79. The method of claim 77, wherein the ssDNA binding protein is fused to the N-terminus of the Type II or Type V CRISPR-Cas effector protein.

80. (canceled)

81. The method of claim 76, wherein the ssDNA binding protein is hRad51 (optionally, hRad51_S208E_A209D), hRad52, BsRecA, EcRecA, T4ssB and/or Brex27.

82. The method of claim 1, further comprising reducing double strand breaks by introducing a chemical inhibitor of non-homologous end joining (NHEJ), by introducing a CRISPR guide nucleic acid or an siRNA targeting an NHEJ protein to transiently knock-down expression of the NHEJ protein, or by introducing a polypeptide that prevents NHEJ, wherein the polypeptide that prevents NHEJ is a Gam protein and the Gam protein is fused to the reverse transcriptase and/or the CRISPR-Cas effector protein, optionally the Gam protein is fused to the N-terminus of the reverse transcriptase and/or the N-terminus of the CRISPR-Cas effector protein.

83-84. (canceled)

85. The method of claim 82, wherein the Gam protein is Escherichia phage Mu Gam protein, optionally the Gam protein comprise the amino acid sequence of SEQ ID NO:147.

86-173. (canceled)
